(19) United States
(12) Patent Application Publication
(10) Pub. No.: US 2008/0044426 A1
(43) Pub. Date: Feb. 21, 2008

(54) Novel Atypical Pneumonia-Causing Virus

(76) Inventors: Jan Cornelis De Jong, Eh Gouda (NL); Theodorus Marinus Bestebroer, Ve Krimpen Aanden Ijssel (NL); James Henry Matthew Simon, Amsterdam (NL); Ronaldus Adrianus Maria Fouchier, Rotterdam (NL); Albertus Dominicus Marcellinus Osterhaus, Antwerpen-Zuid (BE)

Correspondence Address: HOFFMANN & BARON, LLP, 6900 JERICHO TURNPIKE, SYOSSET, NY, 11791, US

(21) Appl. No.: 10/579,614

(22) PCT Filed: Nov. 18, 2004
(86) PCT No.: PCT/NL04/00805

§ 371 Date: Jul. 19, 2007

(30) Foreign Application Priority Data
Nov. 18, 2003 (EP) 03078613.1
Dec. 1, 2003 (EP) 03078772.5

(51) Int. Cl. A61K 39/215; A61K 39/395; A61K 48/00; C07K 16/10; C12N 1/21; C12N 15/40; C12N 15/63; C12N 5/10; C12N 7/01; C12N 9/12; C12Q 1/70

(52) U.S. Cl. 424/159.1; 424/221.1; 435/194; 435/235.1; 435/252.3; 435/348; 435/5; 514/2; 514/44; 530/350; 530/389.4; 536/23.72

(57) ABSTRACT

The invention relates to the field of virology. The invention provides a new isolated essentially mammalian positive-sense single stranded RNA virus (EMCR-CoV) within the group of coronaviuses and components thereof.

[0001] The invention relates to the field of virology.

[0002] Recently, a respiratory illness (atypical pneumonia) was diagnosed in an 8 months old patient that could not be attributed to SARS (Severe Acute Respiratory Syndrome) virus or any other known viral infection. The patient tested negative for influenza, parainfluenza, mumps and RSV and yet the disease was identified to be caused by a virus which closely resembled SARS.

[0003] For being able to trace its origin, monitor its epidemiology and prevent possible spreading of the disease, it is of great importance to be able to recognise viral causes of pneumonia in an early stage. Especially, if severe diseases are found to be caused by viruses, it is necessary to detect the identity of the virus as soon as possible, in order to develop diagnostic tools and possibly therapies. The SARS epidemy has shown that it is paramount for prevention of spread of the disease to be able to get an early diagnosis in order to timely take effective isolation measures en initiate quarantaine precautions. Only then, world-wide contaminations can be prevented.

[0004] Furthermore, identification of the viral cause for the disease enables development of vaccines, which can be used prophylactically to protect people who are at risk of being infected. And, finally, knowledge of the viral cause enables to develop therapeutic measures.

[0005] Thus, there is great need in developing diagnostic tools and therapies for viral pneumonias in general, and particular to a novel disease-causing infectious agent, especially when this agent appears to be a virus.

[0006] The invention provides the nucleotide sequence of an isolated essentially mammalian positive-sense single stranded RNA virus belonging to the Coronaviruses, which is the causative factor for the new disease, hereinafter referred to as EMCR-CoV and the disease being referred to as EMCR-CoV-caused pneumonia. From a phylogenetic analysis of the Matrix and Nucleocapsid gene sequences of the virus (FIGS. 2a and 2b) it appears that the virus is a distinct member of the group formed by PEDV (porcine epidemic diarrhea virus), HCoV-229E (human coronavirus 229E), PRCoV (porcine respiratory coronavirus), TGEV (transmissible gastroenteritis virus), CaCoV (Canine coronavirus) and FeCoV (feline coronavirus). Based on amino acid identity matrices, human coronavirus 229E seems to be the closest relative (for all ORFs with the exception of Matrix which appears to be slightly more closely related to PEDV—see FIG. 3).

[0007] Although phylogenetic analyses provide a convenient method of identifying a virus, several other possibly more straightforward albeit somewhat more coarse methods for identifying said virus or viral proteins or nucleic acids from said virus are herein also provided. As a rule of thumb an EMCR-Coronavirus can be identified by the percentages of homology of the virus, proteins or nucleic acids to be identified in comparison with viral proteins or nucleic acids identified herein by sequence. It is generally known that virus species, especially RNA virus species, often constitute a quasi species wherein a cluster of said viruses displays heterogeneity among its members. Thus it is expected that each isolate may have a somewhat different percentage relationship with the sequences of the isolate as provided herein.

[0008] When one wishes to compare a virus isolate with the sequences as listed in FIG. 1 molo, the invention provides an isolated essentially mammalian positive-sense single stranded RNA virus (EMCR-CoV) belonging to the Coronaviruses and identifiable as phylogenetically corresponding thereto by determining a nucleic acid sequence of said virus and determining that said nucleic acid sequence has a percentage nucleic acid identity to the sequences as listed higher than the percentages identified herein for the nucleic acids as identified herein below in comparison with PEDV, 229E, PRCoV, TGEV, CaCoV and FeCoV. Likewise, an isolated essentially mammalian positive-sense single stranded RNA virus (EMCR-CoV) belonging to the Coronaviruses and identifiable as phylogenetically corresponding thereto by determining an amino acid sequence of said virus and determining that said amino acid sequence has a percentage amino acid homology to the sequences as listed which is essentially higher than the percentages provided herein in comparison with PEDV, 229E, PRCoV, TGEV, CaCoV and FeCoV.

[0009] With the provision of the sequence information of this EMCR-Coronavirus (EMCR-CoV), the invention provides diagnostic means and methods, prophylactic means and methods and therapeutic means and methods to be employed in the diagnosis, prevention and/or treatment of disease, in particular of respiratory disease (atypical pneumonia), in particular of mammals, more in particular in humans associated with infection by this virus. In virology, it is most advisory that diagnosis, prophylaxis and/or treatment of a specific viral infection is performed with reagents that are most specific for said specific virus causing said infection. In this case this means that it is preferred that said diagnosis, prophylaxis and/or treatment of an EMCR-CoV virus infection is performed with reagents that are most specific for EMCR-CoV virus. This by no means however excludes the possibility that less specific, but sufficiently cross-reactive reagents are used instead, for example because they are more easily available and sufficiently address the task at hand.

[0010] The invention for example provides a method for virologically diagnosing an EMCR-CoV infection of an animal, in particular of a mammal, more in particular of a human being, comprising determining in a sample of said animal the presence of a viral isolate or component thereof by reacting said sample with an EMCR-CoV specific nucleic acid or antibody according to the invention, and a method for serologically diagnosing an EMCR-CoV infection of a mammal comprising determining in a sample of said mammal the presence of an antibody specifically directed against an EMCR-CoV virus or component thereof by reacting said sample with an EMCR-CoV virus-specific proteinaceous molecule or fragment thereof or an antigen according to the invention.

[0011] The invention also provides a diagnostic kit for diagnosing an EMCR-CoV infection comprising an EMCR-CoV virus, an EMCR-CoV virus-specific nucleic acid, proteinaceous molecule or fragment thereof, antigen and/or an antibody according to the invention, and preferably a means for detecting said EMCR-CoV virus, EMCR-CoV virus-specific nucleic acid, proteinaceous molecule or fragment thereof, antigen and/or an antibody, said means for example comprising an excitable group such as a fluorophore or enzymatic detection system used in the art (examples of suitable diagnostic kit format comprise IF, ELISA, neutralization assay, RT-PCR assay). To determine whether an as yet unidentified virus component or synthetic analogue thereof such as nucleic acid, proteinaceous molecule or fragment thereof can be identified as EMCR-CoV-virus-specific, it suffices to analyse the nucleic acid or amino acid sequence of said component, for example for a stretch of said nucleic acid or amino acid, preferably of at least 10, more preferably at least 25, more preferably at least 40 nucleotides or amino acids (respectively), by sequence homology comparison with the provided EMCR-CoV viral sequences and with known non-EMCR-CoV viral sequences (human coronavirus 299E is preferably used) using for example phylogenetic analyses as provided herein. Depending on the degree of relationship with said EMCR-CoV or non-EMCR-CoV viral sequences, the component or synthetic analogue can be identified.

[0012] The invention thus provides the nucleotide sequence of a novel etiological agent, an isolated essentially mammalian positive-sense single stranded RNA virus (herein also called EMCR-CoV virus) belonging to the Coronaviridae family, and EMCR-CoV virus-specific components or synthetic analogues thereof.

[0013] Coronaviruses were first isolated from chickens in 1937, while the first human coronavirus was propagated in vitro by Tyrell and Bonoe in 1965. There are now about 13 species in this family, which infect cattle, pigs, rodents, cats, dogs, birds and man. Coronavirus particles are irregularly shaped, about 60-220 nm in diameter, with an outer envelope bearing distinctive, ‘club-shaped’ peplomers (about 20 nm long and 10 nm wide at the distal end). This ‘crown-like’ appearance give the family its name. The envelope carries two glycoproteins: S, the spike glycoprotein which is involved in cell fusion and is a major antigen, and M, the membrane glycoprotein, which is involved in budding and envelope formation. The genome is associated with a basic phosphoprotein, designated N. The genome of coronaviruses, a single stranded positive-sense RNA strand, is typically 27-31 Kb long and contains a 5′ methylated cap and a 3′ poly-A tail, by which it can directly function as an mRNA in the infected cell. Initially the 5′ ORF 1 (about 20 Kb) is translated to produce a viral polymerase, which then produces a full length negative sense strand. This is used as a template to produce mRNA as a ‘nested set’ of transcripts, all with identical 5′ non-translated leader sequence of 72 nucleotides and coincident 3′ polyadenylated ends. Each mRNA thus produced is monocistronic, the genes at the 5′ end being translated from the longest mRNA and so on. These unusual cytoplasmic structures are produced not by splicing, but by the polymerase during transcription. Between each of the genes there is a repeated intergenic sequence—AACUAAAC—which interacts with the transcriptase plus cellular factors to splice the leader sequence onto the start of each ORF. In some coronaviruses there are about 8 ORFs, coding for the proteins mentioned above, but also for a heamagglutenin esterase (HE), and several other non-structural proteins.

[0014] Newly isolated viruses are phylogenetically corresponding to and thus taxonomically corresponding to EMCR-CoV virus when comprising a gene order and/or amino acid sequence and/or nucleotide sequence sufficiently similar to our prototypic EMCR-CoV virus. The highest amino acid sequence identity, between ORFs of EMCR-CoV virus and any of the known other viruses of the same family to date are with human coronavirus 299E or Porcine Epidemic Diarrhea Virus (see FIGS. 3 and 4). The amino acid identities with human coronavirus 229E ranges from 45% (Nucleoprotein) to 81% (Replicase 1b); interestingly, Replicase 1a has an identity of just 56% contrasting with Replicase 1b's 81% identity. EMCR CoV has a closer identity with human coronavirus 229E than with any of the known other viruses of the same family to date for all putative ORFs, with the exception of Matrix, which is slightly more closely related to the Matrix ORF of PEDV. Individual proteins or whole virus isolates with, respectively, higher homology than these mentioned maximum values are considered phylogenetically corresponding and thus taxonomically corresponding to EMCR-CoV virus, and generally will be encoded by a nucleic acid sequence structurally corresponding with a sequence as shown in FIG. 1. Herewith the invention provides a virus phylogenetically corresponding to the isolated virus of which the sequences are depicted in FIG. 1.

[0015] It should be noted that, similar to other viruses, a certain degree of variation can be expected to be found between EMCR-CoV-viruses isolated from different sources.

[0016] Also, the viral sequence of the EMCR-CoV virus or an isolated EMCR-CoV virus gene as provided herein for example shows less than 95%, preferably less than 90%, more preferably less than 80%, more preferably less than 70% and most preferably less than 65% nucleotide sequence homology or less than 95%, preferably less than 90%, more preferably less than 80%, more preferably less than 70% and most preferably less than 65% amino acid sequence homology with the respective nucleotide or amino acid sequence of the human coronavirus 299E or Porcine Epidemic Diarrhea Virus as for example can be found in Genbank (for example in accession number af304460 (HCoV-299E) or af353511 (PEDV).

[0017] Sequence divergence of EMCR-CoV strains around the world may be somewhat higher, in analogy with other coronaviruses.

[0018] The term “nucleotide sequence homology” as used herein denotes the presence of homology between two (poly)nucleotides. Polynucleotides have “homologous” sequences if the sequence of nucleotides in the two sequences is the same when aligned for maximum correspondence. Sequence comparison between two or more polynucleotides is generally performed by comparing portions of the two sequences over a comparison window to identify and compare local regions of sequence similarity. The comparison window is generally from about 20 to 200 contiguous nucleotides. The “percentage of sequence homology” for polynucleotides, such as 50, 60, 70, 80, 90, 95, 98, 99 or 100 percent sequence homology may be determined by comparing two optimally aligned sequences over a comparison window, wherein the portion of the polynucleotide sequence in the comparison window may include additions or deletions (i.e. gaps) as compared to the reference sequence (which does not comprise additions or deletions) for optimal alignment of the two sequences. The percentage is calculated by: (a) determining the number of positions at which the identical nucleic acid base occurs in both sequences to yield the number of matched positions; (b) dividing the number of matched positions by the total number of positions in the window of comparison; and (c) multiplying the result by 100 to yield the percentage of sequence homology. Optimal alignment of sequences for comparison may be conducted by computerized implementations of known algorithms, or by inspection. Readily available sequence comparison and multiple sequence alignment algorithms are, respectively, the Basic Local Alignment Search Tool (BLAST) (Altschul, S. F. et al.1990. J. Mol. Biol. 215:403; Altschul, S. F. et al. 1997. Nucleic Acid Res. 25:3389-3402) and ClustalW programs both available on the internet. Other suitable programs include GAP, BESTFIT and FASTA in the Wisconsin Genetics Software Package (Genetics Computer Group (GCG), Madison, Wis., USA).

[0019] As used herein, “substantially complementary” means that two nucleic acid sequences have at least about 65%, preferably about 70%, more preferably about 80%, even more preferably 90%, and most preferably about 98%, sequence complementarity to each other. This means that the primers and probes must exhibit sufficient complementarity to their template and target nucleic acid, respectively, to hybridise under stringent conditions. Therefore, the primer sequences as disclosed in this specification need not reflect the exact sequence of the binding region on the template and degenerate primers can be used. A substantially complementary primer sequence is one that has sufficient sequence complementarity to the amplification template to result in primer binding and second-strand synthesis.

[0020] The term “hybrid” refers to a double-stranded nucleic acid molecule, or duplex, formed by hydrogen bonding between complementary nucleotides. The terms “hybridise” or “anneal” refer to the process by which single strands of nucleic acid sequences form double-helical segments through hydrogen bonding between complementary nucleotides.

[0021] The term “oligonucleotide” refers to a short sequence of nucleotide monomers (usually 6 to 100 nucleotides) joined by phosphorous linkages (e.g., phosphodiester, alkyl and aryl-phosphate, phosphorothioate), or non-phosphorous linkages (e.g., peptide, sulfamate and others). An oligonucleotide may contain modified nucleotides having modified bases (e.g., 5-methyl cytosine) and modified sugar groups (e.g., 2′-O-methyl ribosyl, 2′-O-methoxyethyl ribosyl, 2′-fluoro ribosyl, 2′-amino ribosyl, and the like). Oligonucleotides may be naturally-occurring or synthetic molecules of double- and single-stranded DNA and double- and single-stranded RNA with circular, branched or linear shapes and optionally including domains capable of forming stable secondary structures (e.g., stem-and-loop and loop-stem-loop structures).

[0022] The term “primer” as used herein refers to an oligonucleotide which is capable of annealing to the amplification target allowing a DNA polymerase to attach thereby serving as a point of initiation of DNA synthesis when placed under conditions in which synthesis of primer extension product which is complementary to a nucleic acid strand is induced, i.e., in the presence of nucleotides and an agent for polymerization such as DNA polymerase and at a suitable temperature and pH. The (amplification) primer is preferably single stranded for maximum efficiency in amplification. Preferably, the primer is an oligodeoxy ribonucleotide. The primer must be sufficiently long to prime the synthesis of extension products in the presence of the agent for polymerization. The exact lengths of the primers will depend on many factors, including temperature and source of primer. A “pair of bidirectional primers” as used herein refers to one forward and one reverse primer as commonly used in the art of DNA amplification such as in PCR amplification.

[0023] The term “probe” refers to a single-stranded oligonucleotide sequence that will recognize and form a hydrogen-bonded duplex with a complementary sequence in a target nucleic acid sequence analyte or its cDNA derivative.

[0024] The terms “stringency” or “stringent hybridization conditions” refer to hybridization conditions that affect the stability of hybrids, e.g., temperature, salt concentration, pH, formamide concentration and the like. These conditions are empirically optimised to maximize specific binding and minimize non-specific binding of primer or probe to its target nucleic acid sequence. The terms as used include reference to conditions under which a probe or primer will hybridise to its target sequence, to a detectably greater degree than other sequences (e.g. at least 2-fold over background). Stringent conditions are sequence dependent and will be different in different circumstances. Longer sequences hybridise specifically at higher temperatures. Generally, stringent conditions are selected to be about 5° C. lower than the thermal melting point (Tm) for the specific sequence at a defined ionic strength and pH. The Tm is the temperature (under defined ionic strength and pH) at which 50% of a complementary target sequence hybridises to a perfectly matched probe or primer. Typically, stringent conditions will be those in which the salt concentration is less than about 1.0 M Na+ion, typically about 0.01 to 1.0 M Na+ion concentration (or other salts) at pH 7.0 to 8.3 and the temperature is at least about 30° C. for short probes or primers (e.g. 10 to 50 nucleotides) and at least about 60° C. for long probes or primers (e.g. greater than 50 nucleotides). Stringent conditions may also be achieved with the addition of destabilizing agents such as formamide. Exemplary low stringent conditions or “conditions of reduced stringency” include hybridization with a buffer solution of 30% formamide, 1 M NaCl, 1% SDS at 37° C. and a wash in 2×SSC at 40° C. Exemplary high stringency conditions include hybridization in 50% formamide, 1 M NaCl, 1% SDS at 37° C., and a wash in 0.1×SSC at 60° C. Hybridization procedures are well known in the art and are described in e.g. Ausubel et al, Current Protocols in Molecular Biology, John Wiley & Sons Inc., 1994.

[0025] The term “antibody” includes reference to antigen binding forms of antibodies (e.g., Fab, F (ab) 2). The term “antibody” frequently refers to a polypeptide substantially encoded by an immunoglobulin gene or immunoglobulin genes, or fragments thereof which specifically bind and recognize an analyte (antigen). However, while various antibody fragments can be defined in terms of the digestion of an intact antibody, one of skill will appreciate that such fragments may be synthesized de novo either chemically or by utilizing recombinant DNA methodology. Thus, the term antibody, as used herein, also includes antibody fragments such as single chain Fv, chimeric antibodies (i. e., comprising constant and variable regions from different species), humanized antibodies (i. e., comprising a complementarity determining region (CDR) from a non-human source) and heteroconjugate antibodies (e. g., bispecific antibodies).

[0026] In short, the invention provides an isolated essentially mammalian positive-sense single stranded RNA virus (EMCR-CoV) belonging to the Coronaviruses and identifiable as phylogenetically corresponding thereto by determining a nucleic acid sequence of a suitable fragment of the genome of said virus and testing it in phylogenetic tree analyses wherein maximum likelihood trees are generated using 100 bootstraps and 3 jumbles and finding it to be more closely phylogenetically corresponding to a virus isolate having the sequences as depicted in FIG. 1 than it is corresponding to a virus isolate of PEDV (porcine epidemic diarrhea virus), HCoV-229E (human coronavirus 229E), PRCoV (porcine respiratory coronavirus), TGEV (transmissible gastroenteritis virus), CaCoV (Canine coronavirus) and FeCoV (feline coronavirus).

[0027] Suitable nucleic acid genome fragments each useful for such phylogenetic tree analyses are for example any of the fragments encoding the Matrix protein or the Nucleocapsid protein as disclosed in FIG. 1, leading to the phylogenetic tree analysis as disclosed herein in FIG. 2a or 2b. Other suitable nucleic acid fragments useful for such phylogenetic tree analyses are for example any of the fragments encoding Replicase 1a and 1b, Spike, orf 4a and 4b, and E.

[0028] A suitable open reading frame (ORF) useful in phylogenetic analyses comprises the ORF encoding the viral replicase (ORF 1a). When an overall amino acid identity of at least 60%, preferably of at least 70%, more preferably of at least 80%, more preferably of at least 90%, most preferably of at least 95% of the analysed replicase with the replicase having a sequence comprising the amino acids of FIG. 1 is found, the analysed virus isolate comprises an EMCR-CoV virus isolate according to the invention.

[0029] A suitable open reading frame (ORF) useful in phylogenetic analyses comprises the ORF encoding the viral replicase (ORF 1b). When an overall amino acid identity of at least 82%, more preferably of at least 90%, most preferably of at least 95% of the analysed replicase with the replicase having a sequence comprising the amino acids of FIG. 1 is found, the analysed virus isolate comprises an EMCR-CoV virus isolate according to the invention.

[0030] Another suitable open reading frame (ORF) useful in phylogenetic analyses comprises the ORF encoding the Nucleocapsid protein. When an overall amino acid identity of at least 50%, more preferably of at least 60%, more preferably of at least 70%, more preferably of at least 80%, more preferably of at least 90%, most preferably of at least 95% of the analysed Nucleocapsid protein with the Nucleocapsid protein encoded by a sequence comprising (part of) the sequence F of FIG. 1 is found, the analysed virus isolate comprises an EMCR-CoV isolate according to the invention.

[0031] Another suitable open reading frame (ORF) useful in phylogenetic analyses comprises the ORF encoding the Matrix protein. When an overall amino acid identity of at least 60%, more preferably of at least 70%, more preferably of at least 80%, more preferably of at least 90%, most preferably of at least 95% of the analysed Matrix protein with the Matrix protein encoded by a sequence comprising (part of) the sequence F of FIG. 1 is found, the analysed virus isolate comprises an EMCR-CoV isolate according to the invention.

[0032] Another suitable open reading frame (ORF) useful in phylogenetic analyses comprises the ORF encoding the spike protein S. When an overall amino acid identity of at least 55%, more preferably of at least 60%, more preferably of at least 70%, more preferably of at least 80%, more preferably of at least 90%, most preferably of at least 95% of the analysed S-protein encoded by a sequence comprising the sequence of translation 2 of E and translation 1 of the F sequence of the S-protein as depicted in FIG. 1 is found, the analysed virus isolate comprises an EMCR-CoV virus isolate according to the invention. The S ORF of the EMCR-CoV virus seems to be located adjacent to the ORF lab (coding for the viral replicase), which would discriminate an EMCR-CoV viruses from the bovine coronavirus and the murine hepatitis virus, which have a so-called 2a gene and an HE-gene between the S protein and the viral polymerase.

[0033] The invention provides among others an isolated or recombinant nucleic acid or virus-specific functional fragment thereof obtainable from a virus according to the invention. The isolated or recombinant nucleic acids comprises the sequences as given in FIG. 1 or sequences of homologues which are able to hybridise with those under stringent conditions. In particular, the invention provides primers and/or probes suitable for identifying an EMCR-CoV virus nucleic acid.

[0034] Furthermore, the invention provides a vector comprising a nucleic acid according to the invention. To begin with, vectors such as plasmid vectors containing (parts of) the genome of the EMCR-CoV virus, virus vectors containing (parts of) the genome of the EMCR-CoV (for example, but not limited thereto, vaccinia virus, retroviruses, baculovirus), or EMCR-CoV virus containing (parts of) the genome of other viruse or other pathogens are provided.

[0035] Also, the invention provides a host cell comprising a nucleic acid or a vector according to the invention. Plasmid or viral vectors containing the replicase components of EMCR-CoV virus are generated in prokaryotic cells for the expression of the components in relevant cell types (bacteria, insect cells, eukaryotic cells). Plasmid or viral vectors containing full-length or partial copies of the EMCR-CoV virus genome will be generated in prokaryotic cells for the expression of viral nucleic acids in-vitro or in-vivo. The latter vectors may contain other viral sequences for the generation of chimeric viruses or chimeric virus proteins, may lack parts of the viral genome for the generation of replication defective virus, and may contain mutations, deletions or insertions for the generation of attenuated viruses.

[0036] Infectious copies of EMCR-CoV virus (being wild type, attenuated, replication-defective or chimeric) can be produced upon co-expression of the polymerase components according to the state-of-the-art technologies described above.

[0037] In addition, eukaryotic cells, transiently or stably expressing one or more full-length or partial EMCR-CoV virus proteins can be used. Such cells can be made by transfection (proteins or nucleic acid vectors), infection (viral vectors) or transduction (viral vectors) and may be useful for complementation of mentioned wild type, attenuated, replication-defective or chimeric viruses.

[0038] A chimeric virus may be of particular use for the generation of recombinant vaccines protecting against two or more viruses. For example, it can be envisaged that EMCR-CoV virus vector expressing one or more proteins of a human metapneumovirus or a human metapneumovirus vector expressing one or more proteins of EMCR-CoV virus will protect individuals vaccinated with such vector against both virus infections. Such a specific chimeric virus is particularly useful in the invention because it is suspected that co-infection of, for instance, human metapneumovirus frequently occurs in coronavirus infected patients. Attenuated and replication-defective viruses may be of use for vaccination purposes with live vaccines as has been suggested for other viruses.

[0039] In a preferred embodiment, the invention provides a proteinaceous molecule or coronavirus-specific viral protein or functional fragment thereof encoded by a nucleic acid according to the invention. Useful proteinaceous molecules are for example derived from any of the genes or genomic fragments derivable from a virus according to the invention. Such molecules, or antigenic fragments thereof, as provided herein, are for example useful in diagnostic methods or kits and in pharmaceutical compositions such as sub-unit vaccines and inhibitory peptides. Particularly useful are the viral replicase protein, the spike protein, the matrix protein, the nucleocapsid or antigenic fragments thereof for inclusion as antigen or subunit immunogen, but inactivated whole virus can also be used. Particularly useful are also those proteinaceous substances that are encoded by recombinant nucleic acid fragments that are identified for phylogenetic analyses, of course preferred are those that are within the preferred bounds and metes of ORFs useful in phylogenetic analyses, in particular for eliciting EMCR-CoV virus specific antibodies, whether in vivo (e.g. for protective puposes or for providing diagnostic antibodies) or in vitro (e.g. by phage display technology or another technique useful for generating synthetic antibodies).

[0040] Also provided herein are antibodies, be it natural polyclonal or monoclonal, or synthetic (e.g. (phage) library-derived binding molecules) antibodies that specifically react with an antigen comprising a proteinaceous molecule or EMCR-CoV virus-specific functional fragment thereof according to the invention. Such antibodies are useful in a method for identifying a viral isolate as an EMCR-CoV virus comprising reacting said viral isolate or a component thereof with an antibody as provided herein. This can for example be achieved by using purified or non-purified EMCR-CoV virus or parts thereof (proteins, peptides) using ELISA, RIA, FACS or similar formats of antigen detection assays (Current Protocols in Immunology). Alternatively, infected cells or cell cultures may be used to identify viral antigens using classical immunofluorescence or immunohistochemical techniques. Specifically useful in this respect are antibodies raised against EMCR-CoV virus proteins which are encoded by a nucleotide sequence comprising one or more of the sequences disclosed in FIG. 1.

[0041] Other methods for identifying a viral isolate as an EMCR-CoV virus comprise reacting said viral isolate or a component thereof with a virus specific nucleic acid according to the invention.

[0042] In this way the invention provides a viral isolate identifiable with a method according to the invention as a mammalian virus taxonomically corresponding to a positive-sense single stranded RNA virus identifiable as likely belonging to the EMCR-CoV virus genus within the family of Coronaviruses.

[0043] The method is useful in a method for virologically diagnosing an EMCR-CoV virus infection of a mammal, said method for example comprising determining in a sample of said mammal the presence of a viral isolate or component thereof by reacting said sample with a nucleic acid or an antibody according to the invention.

[0044] Methods of the invention can in principle be performed by using any nucleic acid amplification method, such as the Polymerase Chain Reaction (PCR; Mullis 1987, U.S. Pat. Nos. 4,683,195, 4,683,202, en 4,800,159) or by using amplification reactions such as Ligase Chain Reaction (LCR; Barany 1991, Proc. Natl. Acad. Sci. USA 88:189-193; EP Appl. No., 320,308), Self-Sustained Sequence Replication (3SR; Guatelli et al., 1990, Proc. Natl. Acad. Sci. USA 87:1874-1878), Strand Displacement Amplification (SDA; U.S. Pat. Nos. 5,270,184, en 5,455,166), Transcriptional Amplification System (TAS; Kwoh et al., Proc. Natl. Acad. Sci. USA 86:1173-1177), Q-Beta Replicase (IAzardi et al., 1988, Bio/Technology 6:1197), Rolling Circle Amplification (RCA; U.S. Pat. No. 5,871,921), Nucleic Acid Sequence Based Amplification (NASBA), Cleavase Fragment Length Polymorphism (U.S. Pat. No. 5,719,028), Isothermal and Chimeric Primer-initiated Amplification of Nucleic Acid (ICAN), Ramification-extension Amplification Method (RAM; U.S. Pat. Nos. 5,719,028 and 5,942,391) or other suitable methods for amplification of nucleic acids.

[0045] In order to amplify a nucleic acid with a small number of mismatches to one or more of the amplification primers, an amplification reaction may be performed under conditions of reduced stringency (e.g. a PCR amplification using an annealing temperature of 38° C., or the presence of 3.5 mM MgCl2). The person skilled in the art will be able to select conditions of suitable stringency.

[0046] The primers herein are selected to be “substantially” complementary (i.e. at least 65%, more preferably at least 80% perfectly complementary) to their target regions present on the different strands of each specific sequence to be amplified. It is possible to use primer sequences containing e.g. inositol residues or ambiguous bases or even primers that contain one or more mismatches when compared to the target sequence. In general, sequences that exhibit at least 65%, more preferably at least 80% homology with the target DNA or RNA oligonucleotide sequences, are considered suitable for use in a method of the present invention. Sequence mismatches are also not critical when using low stringency hybridization conditions.

[0047] The detection of the amplification products can in principle be accomplished by any suitable method known in the art. The detection fragments may be directly stained or labelled with radioactive labels, antibodies, luminescent dyes, fluorescent dyes, or enzyme reagents. Direct DNA stains include for example intercalating dyes such as acridine orange, ethidium bromide, ethidium monoazide or Hoechst dyes. Alternatively, the DNA or RNA fragments may be detected by incorporation of labelled dNTP bases into the synthesized fragments. Detection labels which may be associated with nucleotide bases include e.g. fluorescein, cyanine dye or BrdUrd.

[0048] When using a probe-based detection system, a suitable detection procedure for use in the present invention may for example comprise an enzyme immunoassay (EIA) format (Jacobs et al., 1997, J. Clin. Microbiol. 35, 791-795). For performing a detection by manner of the EIA procedure, either the forward or the reverse primer used in the amplification reaction may comprise a capturing group, such as a biotin group for immobilization of target DNA PCR amplicons on e.g. a streptavidin coated microtiter plate wells for subsequent EIA detection of target DNA -amplicons (see below). The skilled person will understand that other groups for immobilization of target DNA PCR amplicons in an EIA format may be employed.

[0049] Probes useful for the detection of the target DNA as disclosed herein preferably bind only to at least a part of the DNA sequence region as amplified by the DNA amplification procedure. Those of skill in the art can prepare suitable probes for detection based on the nucleotide sequence of the target DNA without undue experimentation as set out herein. Also the complementary nucleotide sequences, whether DNA or RNA or chemically synthesized analogs, of the target DNA may suitably be used as type-specific detection probes in a method of the invention, provided that such a complementary strand is amplified in the amplification reaction employed.

[0050] Suitable detection procedures for use herein may for example comprise immobilization of the amplicons and probing the DNA sequences thereof by e.g. southern blotting. Other formats may comprise an EIA format as described above. To facilitate the detection of binding, the specific amplicon detection probes may comprise a label moiety such as a fluorophore, a chromophore, an enzyme or a radio-label, so as to facilitate monitoring of binding of the probes to the reaction product of the amplification reaction. Such labels are well-known to those skilled in the art and include, for example, fluorescein isothiocyanate (FITC), β-galactosidase, horseradish peroxidase, streptavidin, biotin, digoxigenin, 35S or 125I. Other examples will be apparent to those skilled in the art.

[0051] Detection may also be performed by a so called reverse line blot (RLB) assay, such as for instance described by Van den Brule et al. (2002, J. Clin. Microbiol. 40, 779-787). For this purpose RLB probes are preferably synthesized with a 5′ amino group for subsequent immobilization on e.g. carboxyl-coated nylon membranes. The advantage of an RLB format is the ease of the system and its speed, thus allowing for high throughput sample processing.

[0052] The use of nucleic acid probes for the detection of RNA or DNA fragments is well known in the art. Mostly these procedure comprise the hybridization of the target nucleic acid with the probe followed by post-hybridization washings. Specificity is typically the function of post-hybridization washes, the critical factors being the ionic strength and temperature of the final wash solution. For nucleic acid hybrids, the Tm can be approximated from the equation of Meinkoth and Wahl, Anal. Biochem., 138: 267-284 (1984): Tm=81.5° C.+16.6(log M)+0.41(% GC)−0.61(% form)−500/L; where M is the molarity of monovalent cations, % GC is the percentage of guanosine and cytosine nucleotides in the nucleic acid, % form is the percentage of formamide in the hybridization solution, and L is the length of the hybrid in base pairs. The Tm is the temperature (under defined ionic strength and pH) at which 50% of a complementary target sequence hybridizes to a perfectly matched probe. Tm is reduced by about 1° C. for each 1% of mismatching; thus, the hybridization and/or wash conditions can be adjusted to hybridize to sequences of the desired identity. For example, if sequences with >90% identity are sought, the Tm can be decreased 10° C. Generally, stringent conditions are selected to be about 5° C. lower than the thermal melting point (Tm) for the specific sequence and its complement at a defined ionic strength and pH. However, severely stringent conditions can utilize a hybridization and/or wash at 1, 2, 3, or 4° C. lower than the thermal melting point (Tm); moderately stringent conditions can utilize a hybridization and/or wash at 6, 7, 8, 9, or 10° C. lower than the thermal melting point (Tm); low stringency conditions can utilize a hybridization and/or wash at 11, 12, 13, 14, 15, or 20° C. lower than the thermal melting point (Tm). Using the equation, hybridization and wash compositions, and desired Tm, those of ordinary skill will understand that variations in the stringency of hybridization and/or wash solutions are inherently described. If the desired degree of mismatching results in a Tm of less than 45° C. (aqueous solution) or 32° C. (formamide solution) it is preferred to increase the SSC concentration so that a higher temperature can be used. An extensive guide to the hybridization of nucleic acids is found in Tijssen, Laboratory Techniques in Biochemistm and Molecular Biology—Hybridization with Nucleic Acid Probes, Part I, Chapter 2 “Overview of principles of hybridization and the strategy of nucleic acid probe assays”, Elsevier. New York (1993); and Current Protocols in Molecular Biology, Chapter 2, Ausubel, et al., Eds., Greene Publishing and Wiley-Interscience, New York (1995).

[0053] In another aspect, the invention provides oligonucleotide probes for the generic detection of target RNA or DNA. The detection probes herein are selected to be “substantially” complementary to one of the strands of the double stranded nucleic acids generated by an amplification reaction of the invention. Preferably the probes are substantially complementary to the immobilizable, e.g. biotin labelled, antisense strands of the amplicons generated from the target RNA or DNA.

[0054] It is allowable for detection probes of the present invention to contain one or more mismatches to their target sequence. In general, sequences that exhibit at least 65%, more preferably at least 80% homology with the target oligonucleotide sequences are considered suitable for use in a method of the present invention.

[0055] Antibodies, both monoclonal and polyclonal, can also be used for detection purpose in the present invention, for example, in immunoassays in which they can be utilized in liquid phase or bound to a solid phase carrier. In addition, the monoclonal antibodies in these immunoassays can be detectably labeled in various ways. A variety of immunoassay formats may be used to select antibodies specifically reactive with a particular protein (or other analyte). For example, solid-phase ELISA immunoassays are routinely used to select monoclonal antibodies specifically immunoreactive with a protein. See Harlow and Lane, Antibodies, A Laboratory Manual, Cold Spring Harbor Publications, New York (1988), for a description of immunoassay formats and conditions that can be used to determine selective binding. Examples of types of immunoassays that can utilize antibodies of the invention are competitive and non-competitive immunoassays in either a direct or indirect format. Examples of such immunoassays are the radioimmunoassay (RIA) and the sandwich (immunometric) assay. Detection of the antigens using the antibodies of the invention can be done utilizing immunoassays that are run in either the forward, reverse, or simultaneous modes, including immunohistochemical assays on physiological samples. Those of skill in the art will know, or can readily discern, other immunoassay formats without undue experimentation.

[0056] Antibodies can be bound to many different carriers and used to detect the presence of the target molecules. Examples of well-known carriers include glass, polystyrene, polypropylene, polyethylene, dextran, nylon, amylases, natural and modified celluloses, polyacrylamides, agaroses and magnetite. The nature of the carrier can be either soluble or insoluble for purposes of the invention. Those skilled in the art will know of other suitable carriers for binding monoclonal antibodies, or will be able to ascertain such using routine experimentation.

[0057] The invention also provides a method for serologically diagnosing an EMCR-CoV virus infection of a mammal comprising determining in a sample of said mammal the presence of an antibody specifically directed against an EMCR-CoV virus or component thereof by reacting said sample with a proteinaceous molecule or fragment thereof or an antigen according to the invention

[0058] Methods and means provided herein are particularly useful in a diagnostic kit for diagnosing an EMCR-CoV virus infection, be it by virological or serological diagnosis. Such kits or assays may for example comprise a virus, a nucleic acid, a proteinaceous molecule or fragment thereof, an antigen and/or an antibody according to the invention.

[0059] Use of a virus, a nucleic acid, a proteinaceous molecule or fragment thereof, an antigen and/or an antibody according to the invention is also provided for the production of a pharmaceutical composition, for example for the treatment or prevention of EMCR-CoV virus infections and/or for the treatment or prevention of atypical pneumonia, in particular in humans. Preferably a peptide comprising part of the amino acid sequence of the spike protein as depicted in the relevant translations of FIG. 1, is used for the preparation of a therapeutic or prophylactic peptide. Also preferably, a protein comprising the amino acid sequence of the spike protein as depicted in the relevant translations of FIG. 1, is used for the preparation of a sub-unit vaccine. Furthermore, the nucleocapsid of Coronaviruses, as depicted in the translation of FIG. 1, is known to be particularly useful for eliciting cell-mediated immunity against Coronaviruses and can be used for the preparation of a sub-unit vaccine.

[0060] Attenuation of the virus can be achieved by established methods developed for this purpose, including but not limited to the use of related viruses of other species, serial passages through laboratory animals or/and tissue/cell cultures, serial passages through cell cultures at temperatures below 37° C. (cold-adaption), site directed mutagenesis of molecular clones and exchange of genes or gene fragments between related viruses.

[0061] A pharmaceutical composition comprising a virus, a nucleic acid, a proteinaceous molecule or fragment thereof, an antigen and/or an antibody according to the invention can for example be used in a method for the treatment or prevention of an EMCR-CoV virus infection and/or a respiratory illness comprising providing an individual with a pharmaceutical composition according to the invention. This is most useful when said individual comprises a human. Antibodies against EMCR-CoV virus proteins, especially against the spike protein of EMCR-CoV virus, preferably against the amino acid sequence as depicted in the translation in FIG. 1, are also useful for prophylactic or therapeutic purposes, as passive vaccines. It is known from other coronaviruses that the spike protein is a very strong antigen and that antibodies against spike protein can be used in prophylactic and therapeutic vaccination.

[0062] The invention also provides method to obtain an antiviral agent useful in the treatment of atypical pneumonia comprising establishing a cell culture or experimental animal comprising a virus according to the invention, treating said culture or animal with an candidate antiviral agent, and determining the effect of said agent on said virus or its infection of said culture or animal. An example of such an antiviral agent comprises an EMCR-CoV virus-neutralising antibody, or functional component thereof, as provided herein, but antiviral agents of other nature are obtained as well.

[0063] The invention also provides use of an antiviral agent according to the invention for the preparation of a pharmaceutical composition, in particular for the preparation of a pharmaceutical composition for the treatment of atypical pneumonia, especifically when caused by an EMCR-CoV virus infection, and provides a pharmaceutical composition comprising an antiviral agent according to the invention, useful in a method for the treatment or prevention of an EMCR-CoV virus infection or atypical pneumonia, said method comprising providing an individual with such a pharmaceutical composition.

[0064] The invention also comprises an animal model usable for testing of prophylactic and/or therapeutic methods and/or preparations. It is hypothesized that apes can be infected with the EMCR-CoV virus, thereby showing clinical symptoms, and more importantly, similar tissue morphology as found in humans suffering from atypical pneumonia caused by the EMCR-CoV virus. Subjecting apes to a prophylactic or therapeutic treatment either before or during infection with the virus will have a good and useful predictionary value for application of such a prophylaxis or therapy in human subjects.

[0065] The invention is further explained in the Examples without limiting it thereto.

### FIGURES LEGENDS

[0066] FIG. 1: Nucleotide sequences from parts of the EMCR-CoV virus. Also included are the putative amino acid sequences of polypeptides.

[0067] FIG. 2: Phylogenetic relationship for the nucleotide sequences of isolate EMCR-CoV with its closest relatives genetically. Phylogenetic trees were generated by maximum likelihood analyses using 100 bootstraps and 3 jumbles. The scale representing the number of nucleotide changes is shown for each tree. FIG. 1a. Maximum likelihood tree of matrix gene nucleotide sequences. Numbers in trees represent bootstrap values. The scale bar roughly reflects 10% nucleotide differences between related sequences. FIG. 1b. Maximum likelihood tree of nucleocapsid gene nucleotide sequences. Numbers in trees represent bootstrap values. The scale bar roughly reflects 10% nucleotide differences between related sequences.

[0068] FIG. 3: Similarity matrices indicating amino acid identity for the putative Replicase 1a, Replicase 1b, Replicase 1ab, Spike, Orf E, Matrix and Nucleocapsid proteins 3a-g, respectively), and for the putative Matrix protein and Nucleoprotein (3h and 3i resp.) between the EMCR-CoV virus and closely related coronaviruses. See text for abbreviations.

[0069] FIG. 4 Alignments with various coronaviruses: 5′ untranslated region genomic sequence (a); Putative orf 1a amino acid sequence (b); Putative orf 1b amino acid sequence (c); Putative orf 1ab amino acid sequence (d); Putative Spike amino acid sequence (e); Putative orf 4a amino acid sequence (f); Putative orf 4ab amino acid sequence (g); Putative orf E amino acid sequence (h); Putative Matrix amino acid sequence (i); Putative Nucleoprotein amino acid sequence (j); Putative 3′ untranslated genomic sequence (k); See text for abbreviations.

### EXAMPLES

### Specimen Collection

[0070] Virus was collected from an 8 month old patient suffering from pneumonia using nasal swabs.

### Virus Isolation and Culture

[0071] Throat swabs were dipped into a culture of tMK cells and passaged four times. Virus was then in Vero-118 cells. One litre of virus containing cell culture supernatant was harvested, and the virus was pelleted in an ultracentrifuge and the virus pellet was resuspended 1 ml PBS.

### RNA Isolation

[0072] RNA was isolated from the supernatant of infected cell cultures or sucrose gradient fractions using a High Pure RNA Isolation kit according to instructions from the manufacturer (Roche Diagnostics, Almere, The Netherlands).

### Sequencing

[0073] Purified RNA was sent to BaseClear holding BV (Leiden, The Netherlands) for sequencing.

### Phylogenetic Analyses

[0074] Nucleotide sequences were aligned using Clustal W running under BioEdit version 5.0.9. Maximum likelihood trees were created using the Seqboot and DNA-ML packages of Phylip 5.6 using 100 bootstraps and 3 jumbles. The consensus trees were calculated using the Consense package of phylip 5.6. These consensus trees were used as usertree in DNA-ML to recalculate the branch lengths from the original sequences.

[0075] The sequences of EMCR-CoV were compared with those of reference viruses representing each species in the four groups of coronaviruses. These were: human coronavirus 229E (229E), af304460; porcine epidemic diarrhea virus (PEDV) af353511; transmissible gastroenteritis virus (TGEV), aj271965; bovine coronavirus (BoCoV), af220295; murine hepatitis virus (MHV), af201929; avian infectious bronchitis virus (AIBV), m95169, Canine coronavirus (CaCoV), d13096; feline coronavirus (FeCoV), ay204704; porcine respiratory coronavirus (PRCoV), z24675; human coronavirus OC43 (OC43), m76373, 114643, m933990; porcine haemagglutinating encephalomyelitis virus (HEV), ay078417; rat coronavirus (RtCoV) af207551) References for the viruses are the numbers of the NCBI catalog (http://www.ncbi.nlm.nih.gov/entrezo).

[0076] In general, coronaviruses, such as EMCR-CoV can be isolated and identified according to the following protocol:

### Specimen Collection

[0077] In order to find virus isolates nasopharyngeal aspirates, throat and nasal swabs, broncheo alveolar lavages, serum and plasma samples, and stools preferably from mammals such as humans, carnivores (dogs, cats, mustellits, seals etc.), horses, ruminants (cattle, sheep, goats etc.), pigs, rabbits, birds (poultry, ostriches, etc) should be examined. From birds cloaca swabs and droppings can be examined as well. Sera should be collected for immunological assays, such as ELISA, molecular-based assays, such as RT-PCR and virus neutralisation assays. Collected virus specimens may be diluted with 5 ml Dulbecco MEM medium (BioWhittaker, Walkersville, Md.) and thoroughly mixed on a vortex mixer for one minute. The suspension is thus centrifuged for ten minutes at 840×g. The sediment is spread on a multispot slide (Nutacon, Leimuiden, The Netherlands) for immunofluorescence techniques, and the supernatant is used for virus isolation.

### Virus Isolation

[0078] For virus isolation Vero-118 cells or tMK cells (RIVM, Bilthoven, The Netherlands) were cultured in 24 well plates containing glass slides (Costar, Cambridge, UK), with the medium described below supplemented with 10% fetal bovine serum (BioWhittaker, Vervier, Belgium). Before inoculation the plates were washed with PBS and supplied with Eagle's MEM with Hanks' salt (ICN, Costa mesa, CA) supplemented with 0.52/liter gram NaHCO₃, 0.025 M Hepes (Biowhittaker), 2 mM L-glutamine (Biowhittaker), 200 units/liter penicilline, 200 μg/liter streptomycine (Biowhittaker), 1 gram/liter lactalbumine (Sigma-Aldrich, Zwijndrecht, The Netherlands), 2.0 gram/liter D-glucose (Merck, Amsterdam, The Netherlands), 10 gram/liter peptone (Oxoid, Haarlem, The Netherlands) and 0.02% trypsine (Life Technologies, Bethesda, Md.). The plates were inoculated with supernatant of the patient samples, 0,2 ml per well in triplicate, followed by centrifuging at 840×g for one hour. After inoculation the plates were incubated at 37° C. for 1-7 days and cultures were checked daily for CPE. Extensive CPE was generally observed within 5-10 and included detachment of cells from the monolayer.

### Virus Culture

[0079] Sub-confluent monolayers of tMK cells or Vero clone 118 cells in media as described above were inoculated with supernatants of samples that displayed CPE or with samples taken from a patient.

### RNA Isolation

[0080] RNA was isolated from the supernatant of infected cell cultures or sucrose gradient fractions using a High Pure RNA Isolation kit according to instructions from the manufacturer (Roche Diagnostics, Almere, The Netherlands). RNA can also be isolated following other procedures known in the field (Current Protocols in Molecular Biology).

### Sequence Analysis

[0081] Sequence analyses were performed by BaseClear holding BV (Leiden, The Netherlands).

1. An isolated essentially mammalian positive-sense single stranded RNA virus (EMCR-CoV) comprising the sequence of FIG. 1 or homologues thereof.

2. An isolated positive-sense single stranded RNA virus (EMCR-CoV) belonging to the Coronaviruses and identifiable as phylogenetically corresponding thereto by determining a nucleic acid sequence of said virus and testing it in phylogenetic tree analyses wherein maximum likelihood trees are generated using 100 bootstraps and 3 jumbles and finding it to be more closely phylogenetically corresponding to a virus isolate having the sequences as depicted in FIG. 1 than it is corresponding to a virus isolate of PEDV (porcine epidemic diarrhea virus), HCoV-229E (human coronavirus 229E), PRCoV (porcine respiratory coronavirus), TGEV (transmissible gastroenteritis virus), CaCoV (Canine coronavirus) and FeCoV (feline coronavirus).

3. A virus according to claim 1 wherein said nucleic acid sequence comprises an open reading frame (ORF) encoding a viral protein of said virus.

4. A virus according to claim 3 wherein said open reading frame is selected from the group of ORFs encoding the viral replicase, nuclear capsid protein, matrix protein and the spike protein.

5. A virus according to claim 1 isolatable from a human with atypical pneumonia.

6. An isolated or recombinant nucleic acid or EMCR-CoV virus-specific functional fragment thereof obtainable from a virus according to claim 1.

7. A vector comprising a nucleic acid according to claim 6.

8. A host cell comprising a nucleic acid according to claim 6.

9. An isolated or recombinant proteinaceous molecule or EMCR-CoV virus-specific functional fragment thereof encoded by a nucleic acid according to claim 6.

10. An antigen comprising a proteinaceous molecule or EMCR-CoV virus-specific functional fragment thereof according to claim 9.

11. An antibody specifically directed against an antigen according to claim 10.

12. A method for identifying a viral isolate as an EMCR-CoV virus comprising reacting said viral isolate or a component thereof with an antibody according to claim 11.

13. A method for identifying a viral isolate as an EMCR-CoV virus comprising reacting said viral isolate or a component thereof with a nucleic acid according to claim 6.

14. A method for virologically diagnosing an EMCR-CoV infection of a mammal comprising determining in a sample of said mammal the presence of a viral isolate or component thereof by reacting said sample with a nucleic acid according to claim 6.

15. A method for serologically diagnosing an EMCR-CoV infection of a mammal comprising determining in a sample of said mammal the presence of an antibody specifically directed against an EMCR-CoV virus or component thereof by reacting said sample with a proteinaceous molecule or fragment thereof according to claim 9.

16. A diagnostic kit for diagnosing an EMCR-CoV infection comprising a virus according to claim 1.

17. Use of a virus according to claim 1 for the production of a pharmaceutical composition.

18. Use according to claim 17 for the production of a pharmaceutical composition for the treatment or prevention of an EMCR-CoV virus infection.

19. Use according to claim 17 for the production of a pharmaceutical composition for the treatment or prevention of atypical pneumonia.

20. A pharmaceutical composition comprising a virus according to claim 1.

21. A method for the treatment or prevention of an EMCR-CoV virus infection comprising providing an individual with a pharmaceutical composition according to claim 20.

22. A method for the treatment or prevention of atypical pneumonia comprising providing an individual with a pharmaceutical composition according to claim 20.

23. A viral replicase encoded by an RNA sequence comprising the indicated sequences, or homologues thereof as depicted in FIG. 1.

24. A viral spike protein comprising the indicated amino acid sequence as depicted in FIG. 1, or a homologue thereof.

25. A viral nuclear capsid protein encoded by an RNA sequence comprising the indicated sequence as depicted in FIG. 1 or a homologue thereof.

26. A viral nsp 3 or envelope protein encoded by an RNA sequence comprising the indicated sequence as depicted in FIG. 1, or a homologue thereof.

27. A nucleic acid sequence which comprises one or more of the sequences coding for separate viral proteins as depicted in FIG. 1 or a nucleic acid sequence which can hybridise with any of these sequences under stringent conditions.

28. A host cell comprising a vector according to claim 7.

29. A method for virologically diagnosing an EMCR-CoV infection of a mammal comprising determining in a sample of said mammal the presence of a viral isolate or component thereof by reacting said sample with an antibody according to claim 11.

30. A method for serologically diagnosing an EMCR-CoV infection of a mammal comprising determining in a sample of said mammal the presence of an antibody specifically directed against an EMCR-CoV virus or component thereof by reacting said sample with an antigen according to claim 10.

31. A diagnostic kit for diagnosing an EMCR-CoV infection comprising a nucleic acid according to claim 6.

32. A diagnostic kit for diagnosing an EMCR-CoV infection comprising a proteinaceous molecule or fragment thereof according to claim 9.

33. A diagnostic kit for diagnosing an EMCR-CoV infection comprising an antigen according to claim 10.

34. A diagnostic kit for diagnosing an EMCR-CoV infection comprising an antibody according to claim 11.

35. Use of a nucleic acid according to claim 6 for the production of a pharmaceutical composition.

36. Use of a vector according to claim 7 for the production of a pharmaceutical composition.

37. Use of a host cell according to claim 8 for the production of a pharmaceutical composition.

38. Use of a proteinaceous molecule or fragment thereof according to claim 9 for the production of a pharmaceutical composition.

39. Use of an antigen according to claim 10 for the production of a pharmaceutical composition.

40. Use of an antibody according to claim 11 for the production of a pharmaceutical composition.

41. A pharmaceutical composition comprising a nucleic acid according to claim 6.

42. A pharmaceutical composition comprising a vector according to claim 7.

43. A pharmaceutical composition comprising a host cell according to claim 8.

44. A pharmaceutical composition comprising a proteinaceous molecule or fragment thereof according to claim 9.

45. A pharmaceutical composition comprising an antigen according to claim 10.

46. A pharmaceutical composition comprising an antibody according to claim 11.

The application's sequence listing, which the Patent Office published only in electronic form, follows.

SEQUENCE LISTING (97 sequences)

SEQ ID NO: 1 - DNA, 27530 bp, EMCR Coronavirus
  CDS (265)..(12432): Replicase 1a
  CDS (20435)..(24502): Spike protein
  CDS (25163)..(25396): E protein
  CDS (25405)..(26085): M protein
  CDS (26096)..(27229): E protein
agatagagaattttcttatttagactttgtgtctactcctctcaactaaacgaaatttttctagtgctgtcatttgttatggcagtcctagtgtaattgaaatttcgtcaagtttgtaaactggttaggcaagtgttgtattttctgtgtttaagcactggtggttctgtccactagtgcacacattgatacttaagtggtgttctgtcactgcttattgtggaagcaacgttctgtcgttgtggaaaccaataactgctaaccatgttttacaatcaagtgacacttgctgttgcaagtgattcggaaatttcaggttttggttttgccattccttctgtagccgttcgcgcttatagcgaagccgctgcacaaggttttcaggcatgccgctttgttgcttttggcttacaggattgtgtaaccggtattaatgatgacgattatgtcattgcattgactggtactaatcagctttgtgccaaaattttacttttttctgatagacctcttaatttgcgaggttggctcattttttctaacagcaattatgttcttcaggactttgatgttgtttttggccatggtgcaggaagtgtggtttttgtggataagtatatgtgtggttttgatggtaaacctgtgttacctaaaaacatgtgggaatttagagattactttaatgataatactgatagtattgttattggtggtgtcacttatcaattagcatgggatgttatacgtaaagacctttcttatgaacagcaaaatgttttagctattgagagcattcattatcttggcactacaggtcatactttgaagtctggttgcaaactcattaatgccaagccgcctaaatattcttctaaggttgttttgagtggtgaatggaatgctgtgtataaggcgtttggttcaccatttattacaaatggtatatcattgctagatataattgttaaaccagttttctttaatgcttttgttaaatgcaattgtggttctgagaattggagtgttggtgcatgggatggttatctatcttcttgttgtggcacacctgctaagaaactttgtgttgttcctggtaatgttgttcctggtgatgtgatcatcacctcaactgatgctggttgtggtgttaaatactatgctggcttagttgttaaacatattactaacattactggtgtgtctttatggcgtgttacagctgttcattctgatggaatgtttgtggcaacatcttcttatgatgcacttttgcatagaaattcattagaccctttttgctttgatgttaacactttactttctaatcaattacgtctagcttttcttggtgcttctgttacagaagatgttaaatttgctgctagcactggtgttattgacattagtgctggtatgtttggtctttacgatgacatattgacaaacaataaaccttggtttgtacgcaaagcttctgggctttttgatgcaatctgggatgcttttgttgccgctattaagcttgtgccaactactactggtggtttggttaggtttgttaagtctatcgcttcaactgttttaactgtttctaatggtgttattattatgtgtgcagatgttccagatgcttttcaaccagtttaccgcacatttacacaagctatttgtgctgcatttgatttttctttagatgtatttaaaattggtgatgttaaatttaaacgacttggtgattatgttcttactgaaaatgctcttgttcgtttgactactgaagttgttcgtggtgttcgtgatgctcgcataaagaaagccatgtttactaaagtagttgtaggtcctacaactgaagttaagttttctgttattgaacttgccactgttaatttgcgtcttgttgattgtgcacctgtagtttgccctaaaggtaaaattgttgttattgctggacaagcttttttctatagtggtggtttttatcgttttatggttgattctacaactgtattaaatgaccctgtttttactggtgagttattttatactattaagtttagtggttttaagcttgatggttttaaccatcagtttgttaatgctagttctgctacagatgccattattgctgttgagctgttgttatcggattttaaaactgcagtttttgtgtacacatgtgtggttgatggttgtagtgtcattgttagacgtgatgctacattcgccacacatgtgtgttttaaggactgttatagtatttgggagcaattctgcattgataattgtggtgagccatggtttttgactgattataatgctatcttgcagagtaataaccctcaatgtgctattgttcaagcatcggagtctaaagttttgcttgagaggtttttacctaagtgtcctgaaatactgttgagtattgatgatggccatttatggaatctttttgttgaaaagtttaattttgttacagattggttaaaaactcttaagcttacacttacttctaatggtcttttaggtaattgtgccaaacgttttagacgtgttttggtaaaattgcttgatgtctataatggttttcttgaaactgtctgtagtgtcgtacacactgctggtgtttgcattaaatattatgctgttaatgttccatatgtagttattagtggttttgtaagtcgtgtaattcgtagagaaaggtgtgacgtgacttttccttgtgttagttgtgtcacttttttctatgaatttttagacacgtgttttggtgttagtaaacctaatgccattgatgttgaacatttagagcttaaagaaactgtttttgttgaacctaaggatggtggtcaattttttgtttctgatgattatctttggtatgttgtagatgacatttattatccagcttcatgtaatggtgtattgccagttgcttttacaaaattggcaggtggtaaaatatctttttctgatgatgttatagttcatgatgttgaacctacccataaagtcaagctcatatttgagtttgaagatgatgttgttaccagtctttgtaagaagagttttggtaagtctattatttatacaggtgattgggaaggtttacatgaagttcttacatctgcaatgaatgtcattgggcaacatattaagttgccacaattttatatttatgatgaagagggtggttatgatgtttctaaaccagttatgatttcacaatggcctattagtgatgatagtgatggttgtgttgttgaagcgagcactgattttcatcaattagaatctgttagagaagaggttgatataattgaacaaccttttggggaagttgaacatgcgctctcaattagacaacctttttctttttcttttagagatgaattgggtgttcgtgttttagatcaatctgataataattgttggattagtaccacacttatacagttgcaacttacaaagcttttggatgattctattgagatgcaattgtttaaagttggtaaagttgattcaattgttcaaaagtgttatgagttgtctcatttaattagtggttcacttggtgatagtggtaaacttcttagtgaacttcttaaagataaatatacatgttctataacttttgagatgtcttgtgattgtggtaaaaagtttgatgagcaagttggttgtttgttttggattatgccttacacaaaactttttcaaaaaggtgagtgttgtatttgtcataaaatgcagacttataagcttgttagtatgaaaggtactggtgtgtttgtacaggatccagcacctattgacattgatgctttccctgttagacctatatgttcatctgtatatttaggtgttaagggttctggtcattatcaaacaaatttatacagttttgacaaagctattgatggttttggtgtctttgacattaaaaatagtagtgttaatactgtttgttttgttgatgttgattttcatagtgtagaaatagaagctggtgaagttaaaccttttgctgtatataaaaatgttaaattttatttaggtgatatttcacaccttgtaaactgtgtttcttttgactttgttgtcaatgctgctaatgaaaatctcatgcatggaggcggtgtcgcacgtgctattgatattttgactgaaggtcaacttcagtcattatctaaagattacattagtagtaatggtccacttaaggttggagcaggtgttatgttggagtgtgaaaaattcaatgtatttaatgttgttggtccgcgaactggtaaacatgagcattcattacttgttgaagcttataattctattttatttgaaaatggtattccacttatgcctcttcttagttgtggtatttttggtgtaaggattgaaaattctcttaaagctttgtttagttgtgacattaataaaccattgcaagtttttgtttattcttcaaatgaagaacaagctgttcttaagtttttagatggtttagatttaacaccagtcattgacgatgttgatgttgttaaaccttttagagttgaaggtaatttttcattctttgattgtggtgtcaatgccttggatggtgatatttacttattatttactaactctattttaatgttggataaacaaggacaattattggacacaaaacttaatggtattttgcaacaggcagttcttgattatcttgctacagttaaaactgtaccagctggtaatttggttaaacttgttgttgagagttgtaccatttatatgtgtgttgtaccatcgataaatgatctttcttttgataaaaatcttggtcgttgtgtgcgtaaacttaatagattgaaaacttgtgttattgccaatgttcctgctattgatgttttgaaaaagcttctttcaagtttgactttaactgttaaatttgttgtagagagtaatgttatggatgttaacgactgttttaagaatgataatgtagttttgaaaattactgaagatggtattaatgttaaagatgttgttgttgagtcttctaagtcacttggtaaacaattgggtgttgtgagtgatggtgttgactcttttgaaggtgttttacctattaatactgatactgtcttatctgtagctccagaagttgactgggttgctttttacggttttgaaaaggcagcactttttgcttctttggatgtaaagccatatggttaccctaatgattttgttggtggttttagagttcttgggaccaccgacaataattgttgggttaatgcaacttgtataattttacagtatcttaagcctacttttaaatctaagggtttaaatgttctttggaacaaatttgttacaggtgatgttggaccttttgttagttttatttattttataactatgtcttcaaagggtcaaaagggtgatgctgaagaggcattatctaaattgtcagagtatttgattagtgattctattgttactcttgaacaatattcaacttgtgacatttgtaaaagtactgtagttgaagttaaaagtgctgttgtctgtgctagtgtgcttaaagatggttgtgatgttggtttttgtccacacagacataaattgcgttcacgtgttaagtttgttaatggacgtgttgttattaccaatgttggtgaacctataatttcacaaccttctaagttgcttaatggtattgcttatacaacattttcaggttcttttgataacggtcactatgtagtttatgatgctgctaataatgctgtctatgatggtgctcgtttatttgcttcagatttgtctactttagctgttacagctattgttgtagtaggtggttgtgtaacatctaatgttccaccaattgttagtgagaaaatttctgttatggataaacttgatactggtgcacaaaaatttttccaatttggtgattttgttatgaataacattgttctgtttttaacttggttgcttagtatgtttagtcttttacgtacttctattatgaagcatgatattaaagttattgccaaggctcctaaacgtacaggtgttattttgacacgtagttttaagtataacattagatctgctttgtttgttgtaaagcagaagtggtgtgttattgttactttgtttaagttcttattgttattatatgctatttatgcacttgtttttatgattgtgcaatttagtccttttaatagtcttttatgtggtgacattgtaagtggttatgaaaaatccacttttaataaggatatttattgtggtaattctatggtttgtaagatgtgtttgtttagttatcaagagtttaatgatttggatcatactagtcttgtttggaagcacattcgtgatcctatattaatcagtttacaaccatttgttatacttgttattttgttaatttttggtaatatgtatttgcgttttggacttttatattttgttgcacaatttattagtacttttggttctttcttaggctttcatcagaaacagtggtttttacattttgtgccgtttgatgttttatgtaatgagtttttagctacatttattgtctgcaaaattgttttatttgttagacatattattgttggctgtaataatgctgactgtgtagcttgttctaaaagtgctagacttaaacgtgtaccacttcaaactattattaatggtatgcataaatcattctatgttaatgctaatggtggtacttgtttctgtaataaacataacttcttttgtgttaattgtgattcttttgggcctggtaatacttttattaatggtgatattgcaagagagcttggtaatgttgttaaaacagctgttcaacccacagctcctgcatatgttattattgataaggtagattttgttaatggattttatcgtctttatagtggtgacactttttggcggtatgactttgacattactgaatctaagtatagttgtaaagaggttctgaagaattgtaatgttttagaaaattttattgtttacaataatagtggtagtaacattacacagattaaaaatgcttgtgtttatttttctcaattgttgtgtgaacctataaagttggtaaattcagagttgttgtcaactttatcagttgattttaatggtgttttgcataaggcatatgttgatgttttgtgtaatagtttttttaaggagctaactgctaacatgtccatggctgaatgtaaagctacacttggtttgactgtttctgatgatgattttgtttcagctgttgccaatgcacataggtatgacgttttgctttcagatttgtcatttaataatttttttatttcttatgctaaacctgaagataagttgtccgtttatgacattgcttgttgtatgcgtgccggttctaaggttgttaaccataatgttttaatcaaagagtcaatacctattgtttggggtgtcaaggactttaatactctttctcaagaaggtaagaagtaccttgttaaaacaactaaagcaaagggtttgacttttttattaacttttaatgataaccaagcaattacacaagttcctgctactagtatagttgcaaaacagggtgctggttttaaacgtacttataattttctgtggtatgtatgtttatttgttgttgcattgtttattggtgtctcatttattgattatacaaccactgtaactagctttcatggttatgattttaagtacattgagaatggtcagttgaaggtgtttgaagcacctttacactgtgttcgtaatgtttttgataattttaatcaatggcatgaggctaagtttggtgttgttactactaatagtgataaatgtcctatagttgttggtgtttcagagcgtattaatgttgttcctggtgttccaacaaatgtatatttggtaggaaagactcttgtttttacattacaggctgcttttggaaacacaggtgtttgttatgactttgatggtgttaccactagtgataagtgtatttttaattctgcttgtactaggttggaaggtttgggtggtgacaatgtttattgttacaacactgatcttattgaaggttctaaaccttatagtattttacagcccaatgcttattataagtatgatgttaaaaattatgtacgttttccagaaattttagctagaggttttggcttacgtactattagaactttggctacacgttattgtagagttggtgaatgccgtgactcacataaaggtgtttgttttggttttgataaatggtatgttaatgatggacgtgttgatgacggttacatttgtggtgatggtcttatagaccttcttgttaatgtactctcaatctttagttcatcttttagcgttgtggctatgtctggacatatgttgtttaattttctttttgcagcatttattacatttttgtgctttttagttactaaatttaaacgtgtttttggtgatctttcttatggtgtttttactgttgtttgtgcaactttgattaataacatttcttatgttgttactcaaaatttattttttatgttgctttatgctattttgtattttgtttttactaggacagtgcgttatgcttggatttggcatattgcatacattgttgcatacttcttgttaataccatggtggcttctcacatggtttagttttgctgcatttttagagcttttacctaatgtttttaagttaaaaatctctactcaattgtttgaaggtgataagtttataggtacttttgagagtgctgctgcaggtacatttgttcttgacatgcgttcttatgaaaggctgataaatactatttcacctgagaaacttaagaattatgctgcaagttataataaatataaatattatagtggtagtgctagtgaggctgattatcgttgtgcttgttatgctcatttagccaaggctatgttagattacgcaaaagatcataatgacatgttatattctccacctaccattagctacaattccaccttacaatctggtcttaagaagatggcacaaccatctggttgtgttgagagatgtgtggttcgcgtctgttatggtagtactgtgcttaatggagtttggttaggtgacactgttacttgtcctagacatgtcatagcaccatcaaccactgttcttattgattatgatcatgcatatagtactatgcgtttgcataatttttcagtgtctcataatggtgtcttcttgggagttgttggtgttacaatgcatggttctgtgttgcgtattaaggtttcacaatctaatgtacatacacctaaacatgtttttaaaacgttgaaacctggtgcttcttttaatattttagcatgttatgaaggtattgcatctggtgtttttggtgttaatttacgtacaaactttactattaaaggttcttttataaatggagcttgtggttctcctggttataatgttagaaatgatggtactgttgagttttgttatttacaccaaattgagttaggtagtggtgctcatgttggttctgattttactggtagtgtttatggtaattttgatgaccaacctagtttgcaagttgagagtgccaaccttatgctatcagataatgttgttgcctttttgtatgctgctttgttgaatggttgtaggtggtggttgcgttcaactagagttaatgttgatggttttaatgaatgggctatggctaatggttatacaattgtttctagtgttgagtgctattctattttggcagcaaaaactggtgttagtgttgaacaattgttagcttccattcaacatcttcatgaaggttttggtggtaaaaacatacttggttattctagtttatgtgatgagttcacactagctgaagttgtgaagcagatgtatggtgttaacttgcaaagtggtaaggttatttttggtttaaaaacaatgtttttatttagcgttttcttcacaatgttttgggcagaactctttatttatacaaacactatatggataaaccctgttatacttacacctatattttgtttacttttgtttttgtcattagttttaactatgtttcttaaacataagtttttgtttttgcaagtatttttattacctactgttattgcaactgctttatataattgtgttttggattattacatagtaaaatttttggctgaccattttaactataatgtttcagtattacaaatggatgttcagggtttagttaatgttttggtctgtttatttgttgtatttttacacacatggcgtttttctaaagaacgtttcacacattggtttacatatgtgtgttctcttatagcagttgcttacacttatttttatagtggtgactttttgagtttgcttgttatgtttttatgtgctatatctagtgattggtacattggtgccattgtttttaggttgtcacgtttgattatatttttttcacctgaaagtgtatttagtgtttttggtgatgtgaaactcactttagttgtttatttaatttgtggttatttagtttgtacttattggggcattttgtattggttcaataggttttttaaatgtactatgggtgtttatgattttaaggtgagtgctgctgaatttaaatacatggttgctaatggacttcatgcaccatatggaccttttgatgcactttggttatcattcaaattacttggtattggtggtgaccgttgtataaaaatttcaactgtccaatccaaactgactgatttgaagtgtactaatgttgtgttattgggttgtttgtctagtatgaacattgcagctaattctagtgaatgggcttattgtgttgatttacacaataagattaatctttgtgatgacccagaaaaagctcaaggtatgttgttagcactccttgcgttctttctaagtaaacatagtgattttggtcttgatggccttattgattcttattttgataatagtagcaccctgcagagtgttgcttcatcatttgttagtatgccatcatatattgcttatgaaaatgctagacaagcttatgaggatgctattgctaatggatcttcttctcaacttattaaacaattgaagcgtgccatgaatatcgcaaagtctgaatttgatcatgagatatctgttcagaagaaaattaatagaatggctgaacaagctgctactcagatgtataaagaagcacgctctgttaatagaaaatctaaagttattagtgctatgcactctttactttttggaatgttaagacgtttggatatgtctagtgttgaaactgttttgaatttagcacgtgatggtgttgtgccattgtcagttatacctgcaacttcagcttccaaactaactattgttagtccagatcttgaatcttattctaagattgtttgtgatggttctgttcattatgctggagttgtttggacacttaatgatgttaaagacaatgatggtagacctgttcatgttaaagagattacaagggagaatgttgaaactttgacatggcctcttatccttaattgtgaacgtgttgttaaacttcaaaataatgaaattatgcctggtaaacttaagcaaaaacctatgaaagctgagggtgatggtggtgttttaggtgatggtaatgctttgtataatactgagggtggtaaaacttttatgtatgcttatatttctaataaagctgaccttaaatttgttaagtgggagtatgagggtggttgcaacacaatcgagttagactctccttgtcgatttatggtcgaaacacctaatggtcctcaagtgaagtatttgtattttgttaaaaatttaaataccttacgtagaggtgccgttcttggttttataggtgccacaattcgtctacaagctggtaaacaaactgaattggctgttaattctggacttttaactgcttgtgctttttctgttgatccagcaaccacttacttggaagctgttaaacatggtgcaaaacctgtaagtaattgtattaagatgttatctaatggtgctggtaatggtcaagctataacaactagtgtagatgctaacaccaatcaagattcttatggtggagcgtctatttgtttgtattgtcgggcccacgttcctcaccctagtatggatggttactgtaagtttaagggtaaatgtgttcaggttcctattggttgtttggatcctattaggttttgtttagaaaataatgtgtgtaatgtttgtggttgttggttgggacacgggtgtgcttgtgatcgtacaaccattcaaagtgttgacatttcttatttaaacgagcaaggggttctagtgcagctcgactagaaccctgtaatggcacggacatcgataagtgtgttcgtgcttttgacatttataataaaaatgtttcattcttgggtaagtgtttgaagatgaactgtgttcgttttaaaaatgctgatcttaaggatggttattttgttataaagaggtgtactaagtcggttatggaacacgagcaatccatgtataacctacttaacttttctggtgctttggctgagcatgatttctttacttggaaagatggcagagtcatttatggtaatgttagtagacataatcttactaaatatactatgatggacttggtttatgctatgcgtaactttgatgaacaaaattgtgatgttctaaaagaagtattagttttaactggttgttgtgacaattcttattttgatagtaagggttggtatgacccagttgaaaatgaagatatacatagagtttatgcatctcttggcaaaattgtagctagagctatgcttaaatgcgttgctctatgtgatgcgatggttgctaaaggtgttgttggtgttttaacattagataaccaagatcttaatggtaacttttatgattttggtgattttgttgttagcttacctaatatgggtgttccctgttgtacatcatattattcttatatgatgcctattatgggtttaactaattgtttagctagtgagtgttttgtcaagagtgatatttttggtagtgattttaaaacttttgatttgcttaagtatgatttcactgaacataaagaaaatttattcaataagtactttaagcattggagttttgattatcatcctaattgtagtgactgttatgatgatatgtgtgttatacattgtgctaattttaatacactatttgccacaactataccaggtactgcttttggtccactatgtcgtaaagtttttatagatggtgttccacttgttacaactgctggttatcattttaagcaattaggtttggtttggaataaagatgttaacacacactcagttaggttgacaatcactgaacttttgcaatttgttactgacccttccttgataatagcttcttctccagcactcgttgatcaacgcactatttgtttttctgttgcagcattgagtactggtttgacaaatcaagttgttaagccaggtcattttaatgaagagttttataactttcttcgtttaagaggtttctttgatgaaggttctgaacttacattaaaacatttcttcttcgcacagaatggtgatgctgctgttaaagattttgacttttaccgttataataagcctaccattttagatatttgtcaagctagagttacatataagatagtctctcgttattttgacatttatgaaggtggctgtattaaggcatgtgaagttgttgtaacaaatcttaataagagtgctggttggccattaaataagtttggtaaagctagtttgtattacgaatctatatcttatgaagaacaggatgctttgtttgctttgacaaagcgtaatgtcctccctactatgacacagctgaatcttaagtatgctattagtggtaaagaacgtgctagaactgttggtggtgtttctctgttgtccacaatgaccacaagacaataccatcaaaaacatcttaaatccattgttaatacacgcaatgccactgttgttattggtactaccaaattttatggtggttggaataatatgttgcgtactttaattgatggtgttgaaaaccctatgctcatgggttgggattatcccaaatgtgatagagctttgcctaacatgatacgtatgatttcagccatggtgttgggttctaagcatgttaattgttgtactgtaacagataggttttataggcttggtaacgagttggcacaagttttaacagaagttgtttattctaatggtggtttttattttaagccaggtggtacgacttctggtgacgctagtacagcttatgctaattctatttttaacatttttcaagccgtgagttctaacattaacaggttgcttagtgtcccatcagattcatgtaataatgttaatgttagggatctacaacgacgtctgtatgataattgctataggttaactagtgttgaagagtcattcattgatgattattatggttatcttaggaaacatttttcaatgatgattctctctgatgacggtgttgtctgttataacaaggattatgctgagttaggttatatagcagacattagtgcttttaaagccactttgtattaccagaataatgtctttatgagtacttctaaatgttgggttgaagaagatttaactaagggaccacatgagttttgttcccagcatactatgcaaatagttgataaagatggtacctattatttgccttacccagatcctagtaggatcttgtcagctggtgtttttgttgatgatgttgttaagacagatgctgttgttttgttakaacgttatgtgtctttagctattgatgcataccctctttcaaaacaccctaattctgaatatcgtaaggttttttacgtattacttgattgggttaagcatcttaacaaaaatttgaatgagggtgttcttgaatctttttctgttacacttcttgataatcaagaagataagttttggtgtgaagatttttatgctagtatgtatgaaaattctacaatattgcaagctgctggcttatgtgttgtttgtggttcacaaactgttcttcgttgtggtgattgtctgcgtaagcctatgttgtgcactaaatgtgcatatgatcatgtatttggtaccgaccacaagtttattttggctataacaccgtatgtatgtaatgcatcaggttgtggtgttagtgatgttaaaaaattgtatcttggtggtttgaattactattgtacaaatcataaaccacagttgtcttttccattatgttctgctggtaatatatttggtttatataaaaattcagcaactggttccttagatgttgaagtttttaataggcttgcaacgtctgattggactgatgttagggactataaacttgctaatgatgttaaagatacacttagactctttgcggctgaaactattaaagctaaagaagagagtgttaagtcttcttatgcttttgcaactcttaaagaggttgttggacctaaagaattgcttcttagttgggaaagtggtaaagttaaaccacctttgaatcgtaattctgttttcacctgttttcaaataagtaaggactcaaaattccaaataggtgagttcatctttgaaaaggttgaatatggttctgatactgttacgtataagtctactgtaaccactaagttagttcctggtatgatttttgtcttaacatctcacaatgttcaacctttacgtgcaccaactattgcaaaccaagagaagtattctagcatttataaattgcaccctgcttttaatgtcagtgatgcatatgctaatttggttccatattaccaacttattggtaaacaaaagataactacaatacagggtcctcctggtagtggtaagtcacattgttccattggacttggattgtactatccaggtgcgcgtattgtttttgttgcttgtgcccatgctgctgttgattccttatgtgcaaaagctatgactgtttatagcattgataagtgtactaggattatacctgcaagagctcgggttgagtgttatagtggctttaaaccaaataacactagtgcacaatacatatttagcactgttaacgcattacctgagtgtaatgctgatattgttgttgtagatgaagtttcaatgtgtacaaattatgacctttctgttattaatcagcgtttatcatataaacatattgtttatgttggtgatccacaacaacttcctgcacctagagtaatgattactaaaggtgttatggagcctgttgattataacgttgttactcaacgtatgtgtgctataggccctgatgtttttcttcataaatgttatagatgtcctgctgaaatagttaatacagtttctgaacttgtttatgagaacaagtttgtccctgttaaacctgctagtaaacagtgttttaaaatcttttttaagggtaatgtacaggttgacaatggctctagtattaacagaaagcagcttgaaatagttaagctgtttttagttaaaaatccaagttggagtaaggctgtgtttatttctccttataatagtcagaattatgttgctagtagatttttaggacttcaaattcaaactgttgattcttctcaaggtagtgagtatgattatgtaatctatgcacaaacttctgacactgcacatgcttgcaatgtaaaccgttttaatgttgctataacacgtgctaagaagggtatattttgtgtaatgtgtgataaaactttgtttgattcacttaagttttttgagattaaacatgcagatttacactctagccaggtttgtggcttgtttaaaaattgtacacgcactcctcttaatttaccaccaactcatgcacacactttcttgtcgttgtcagatcagtttaagactacaggtgatttagctgttcaaataggttcaaataatgtttgtacttatgaacatgttatatcatttatgggttttaggtttgatattagtattcctggtagtcatagtttgttttgtacacgtgactttgctattcgtaatgtgcgtggttggttgggtatggatgttgaaagtgctcatgtttgtggcgataacataggtactaatgttcctttacaggttggtttttcaaatggtgttaattttgttgtgcaaactgaaggttgtgtgtctaccaattttggtgatgttattaaacctgtttgtgcaaaatctccaccaggtgaacaatttagacaccttgttccttttttacgtaaaggacaaccttggttaattgttcgtagacgcattgtgcaaatgatatctgattatttgtccaatttgtctgacattcttgtctttgttttgtgggcaggtagtttggaattaactacaatgcgttactttgtaaaaatagggccaattaaatattgttattgtggtaattctgccacttgttataattcagttagtaatgaatattgttgttttaaacatgcattgggttgtgattatgtttacaatccgtatgcttttgatatacaacagtggggttatgttggttccttgagccagaaccaccacacgttctgtaacattcatagaaacgagcatgatgcttctggtgatgctgttatgacacgttgtttggcagtacatgattgttttgtcaaaaatgttgattggactgtaacgtacccctttattgcaaatgagaaatttatcaatggctgtgggcgtaatgtccagggacatgttgttcgcgcagccttgaaattgtataaacctagtgttattcatgatattggtaatcctaaaggtgtacgttgtgctgttactgatgccaaatggtactgttatgacaagcaacctgttaatagtaatgtcaagttgttggattatgattatgcaacccatggtcaacttgatggtctttgtttattctggaattgtaatgttgatatgtatccagaattttcaattgtgtgtcgctttgacacacgtactcgttctgtttttaatttagaaggtgttaatggtggttctctttatgttaacaaacatgcgtttcatacaccagcatatgataaacgtgcttttgttaaattaaaacctatgccctttttttactttgatgacagtgattgtgatgttgtgcaagaacaagttaattatgtaccccttcgcgctagtagttgtgttacccgttgtaatataggtggtgctgtttgttcaaaacatgcaaatttgtatcaaaaatatgttgaggcatataatacatttacacaggctggttttaacatttgggtaccacatagttttgatgtttataatttgtggcaaatttttattgaaactaatttacaaagtcttgaaaatatagcatttaatgttgtaaaaaaagggtgttttactggtgttgatggtgagttacctgttgcagttgttaacgacaaagtttttgttcgctatggcgatgttgacaacttggtttttacaaataaaacaacattgcctactaatgttgcttttgaattgtttgcaaaacgaaaaatgggtttaacaccaccattgtctattctcaaaaatcttggtgttgttgctacatataaatttgttttatgggattatgaagctgaaagaccttttacctcatatactaagagtgtatgtaaatacactgattttaatgaggatgtttgtgtttgttttgacaatagtattcagggttcgtatgagcgttttacgcttactacgaacgctgttttattttctactgttgtcattaaaaatttaacacctataaagttgaattttggtatgttgaatggtatgccagtttcttctattaagagtgataaaggtgttgaaaaattagttaattggtacacatatgttcgtaaaaatggtcaatttcaagatcattatgatggtttttacactcaaggtaggaatttatcagactttacaccaagaagtgatatggagtatgattttcttaacatggatatgggtgtttttattaataaatatggtcttgaggattttaattttgaacatgttgtatatggtgatgtttcaaaaactacattaggaggtcttcatttgttgatatcacagtttaggcttagtaaaatgggtgttttgaaagctgatgattttgtcactgcttctgacacaactttgaggtgctgtactgttacttatcttaatgaacttagttcaaaagttgtttgtacttatatggatttgttgttggacgactttgttactatactaaagagtttagatcttggtgtaatatctaaagttcatgaagttattatagataataaaccttataggtggatgttgtggtgtaaagataaccacttgtccactttttatccacagttgcagtctgctgaatggaagtgtggttatgctatgccacaaatttataagcttcaacgtatgtgtttggaaccttgtaatttatataattatggtgctggtattaagttgcctagtggtataatgttaaatgttgttaaatacactcagctttgtcaatacctaaatagcactacaatgtgcgtacctcataatatgcgtgttttgcactatggtgctggttctgacaaaggtgtggcacctggtacaactgttttaaaacgttggctaccacctgatgcaataatcattgataatgatatcaatgattatgttagtgatgcagattttagcattacaggtgattgtgctactgtttaccttgaagataagtttgacttacttatttctgatatgtatgatggtagaattaaattttgtgatggtgaaaacgtctctaaagatggtttttttacttatcttaatggtgttattagagaaaaattagctattggtggtagtgttgccattaagattacagaatatagttggaataagtatctttatgaattaatacaaagatttgctttttggactttgttctgcacgtctgttaatacatcctcttcagaagcttttcttattggtattaattatttaggtgactttattcaaggtccttttatagctggtaacactgttcatgctaattatatattttggcgtaattctactattatgtctttgtcatacaattcagttttagatttaagtaagtttgaatgtaaacataaggccactgttgttgttacacttaaagatagtgatgtaaatgatatggttttgagtttgattaagagtggtaggttgttgttacgtaatagtggccgttttggtggttttagtaatcatttagtctcaactaaatgaaacttttcttgattttgcttattttgcccctggtttcttgcttttctacatgtaacagtaatgctagtatttctatgttacaattaggtgttcctgataactcttcaactattgtcacaggtttgttgccagtccattggatttgtgctaatcagagtacatctagttacccagccaacggctttttctatattgatgttggtaaacaccgtagtgcctttgcactccatagtggttattatgatgctaaccagtattatatttatctcactaataaaatacatttaaatgctcctgtcactctgaagatttgtaagtttggaaacacttcttttgattttttaagtaatgtttctacttctcatgattgtatagttaatttgtcattcacagaacagttaggtgtgcctttgggcataactatatcgggtgaaactgtacgtttgcatttatataatgcaactcgtactttttatgtgccggccgcttataaacttactaaacttagtgttaaatgttactttagtgaatcctgtgtttttagtgttgtcaatgccaccattactgttaatgtcaccacacttaatggccgtatagttaactacactgtttgtgatgattgtaatggttatactgataacatattttctgttcaacaggatggccgcattcctaatggtttcccttttaataattggtttttgttaactaatggttccacattagtggacggggtctctagactttatcaaccactccgtttaacttgtttatggcctgtacctggtcttaaatcttcaactggttttgtttattttaatgccactggttctgatgttaattgtaacggctatcaacataattctgttgctgatgttatgcgttacaatcttaacctcagtgctaattctgtggacaatcttaagagtggtgttatagtttttaaaactttacagtacgatgttttgttttattgtagtaattcttcttcaggtgttcttgacaccacaataccttttggcccttcctctcaaccttattactgttttataaacagtactatcaacactactcatgttagcacttttgtgggtattttaccacccactgtgcgtgaaattgttgttgctagaactggtcagttttatattaatggttttaagtatttcgatttgggtttcatagaagctgtcaattttaatgtcacgactgctagtgccacagatttttggacggttgcatttgctacttttgttgatgttttggttaatgttagtgcaactaacattcaaaacttactttattgcgattctccatttgaaaagttgcagtgtgagcacttgcagtttggattgcaagatggtttttattctgcaaattttcttgatgataatgttttgcctgagacttatgttgcactccccatttattatcaacatacggacataaattttactgcaactgcatcttttggtggttcttgttatgtttgtaaaccacgccaggttaatatatctcttaatggtaacacttcagtgtgtgttagaacatctcatttttcaattaggtatatttataaccgcgttaagagtggttcaccaggtgactcttcatggcatatttatttaaagagtggcacttgtccattttctttttctaagttaaataattttcaaaagtttaagactatttgtttctcaaccgtcgaagtgcctggtagttgtaattttccacttgaagccacctggcattacacttcttatactattgttggtgctttgtatgttacttggtctgaaggtaattccattactggtgtaccttatcctgtctctggtattcgtgagtttagtaatttagttttaaataattgtaccaaatataatatttatgattatgttggtactggaattatacgttcttcaaaccagtcacttgctggtggtattacatatgtttctaactctggtaatttacttggttttaaaaatgtttccactggtaacatttttattgtgacaccatgtaaccaaccagatcaagtagctgtttatcaacaaagcattattggtgccatgaccgctgttaatgagtctagatatggcttgcaaaacttactacagttacctaacttttattatgttagtaatggtggtaacaattgcactacggctgttatgatttattctaattttggtatttgtgctgatggttctttaattcctgttcgtccgcgtaattctagtgataatggtatttcagccataatcactgctaatttatccattccctctaactggactacttcagttcaagttgagtacctccaaattactagtactccaatagttgttgattgtgctacttatgtgtgtaatggtaaccctcgttgtaagaatctacttaagcagtatacttctgcttgtaaaactattgaagatgccttacgacttagtgctcatttggaaactaatgatgttagtagtatgctaactttcgatagcaatgcttttagtttggctaatgttactagttttggagattataacctttctagtgttttacctcagagaaacattcattcaagccgtatagcaggacgtagtgctttggaagatttgttgtttagcaaagttgttacatctggtttgggtactgttgatgttgactataagtcttgtactaaaggtctttctattgctgaccttgcttgtgctcagtactacaatggcataatggttttgccaggtgttgctgatgctgaacgtatggccatgtacacaggttctcttataggtggcatggtgctcggaggtcttacatcagcagccgccatacctttttctttggcactgcaagcacgacttaactatgttgctttacaaactgatgtgcttcaagaaaatcagaaaattttggctgcatcatttaataaggctattaataatattgttgcttcttttagtagcgttaatgatgctattacacatactgcagaggctatacatactgttactattgcacttaataagattcaggatgttgttaatcaacagggtagtgctcttaaccatctcacttcacaattgagacataattttcaggccatttctaattcaattcatgctatttatgaccggcttgattcaattcaagccgatcaacaagttgacagattaattactggacggcttgcagctttgaatgcatttgtttcccaagttttgaataaatatactgaagttcgtggttccagacgcttagcacagcagaagattaatgaatgtgtcaagtcacaatctaatagatatggtttttgtggcaatggcactcacatcttttcaatcgtcaactcagctccagatggtttgctttttcttcatactgttttgctgccaactgattacaagaatgtaaaggcgtggtctggtatctgtgttgatggcatttatggctatgttctgcgtcaacctaacttggttctttattctgataatggtgtctttcgtgtaacttccagggtcatgtttcaacctcgtttacctgttttgtctgattttgtgcaaatatataattgtaatgttacttttgttaacatatctcgtgtcgagttacatactgtcatacctgactacgttgatgttaataaaacattacaagagtttgcacaaaacttaccaaagtatgttaagcctaattttgacttgactccttttaatttaacatatcttaatttgagttctgagttgaagcaactcgaagctaaaactgctagtcttttccaaactactgttgaattacaaggtcttattgatcagattaacagtacatatgttgatttgaagttgcttaataggtttgaaaattatatcaaatggccttggtgggtttggctcattatttctgttgtttttgttgtattgttgagtcttcttgtgttttgttgtctttctacaggttgttgtggttgttgcaattgtttaacttcatcaatgcgaggctgttgtgattgtggttcaactaaacttccttattatgaatttgaaaaggtccacgttcaataatgcctttcggtggcctatttcaacttactcttgaaagtactattaataagagtgtggctaatctcaaattaccacctcatgatgttactgtcttgcgtgacaatcttaaacctgttactacacttagtactatcactgcttatttgttagttagtttgtttgtcacttattttgctttattcaaacctcttactgctagaggtcgtgttgcttgttttgttttaaaactattgacactatctgtctatgtgcctttattggttctttttggtatgtatcttgacagttttataattttttttctacgctgttgtttcgattcatacatgttggctattatgcctatctctaataaaaatttttcatttgttttgttcaatgttactaaactatgcttcgtttcaggcaagtgttggtatcttgaacaatcattttatgaaaatcgttttgctgctatttatggtggtgaccactatgtcgttttaggtggtgaaactattacttttgtttcttttgatgacctttatgttgctattagaggttcttgtgaaaagaacctacaacttatgcgtaaggttgacttgtataatggtgctgtcatttacatttttgccgaagagcctgttgttggtatagtttactcctctcaactatacgaagatgttccttcgattaattgatgacaatggcattgtcctcaattctattttatggctccttgttatgatatttttctttgtgttggcaatgacctttattaaactgattcaattgtgttttacttgtcattatttttttagtaggacattatatcaaccagtttataaaatttttcttgcttaccaagattatatgcaaatagcacctgttccagctgaagtactaaatgtctaaactaaacgatgtctaatagtagtgtgcctctttcagaggtttatgtccatttacgtaactggaactttagttggaatttaattctaacagtttttatagttgtgttgcagtatgggcattataagtatagcagacttctttatggtttaaagatgtctgttttatggtgtttatggccacttgttctagctttgtctatttttgactgttttgtcaattttaatgtggactgggtcttttttggttttagtattcttatgtctattattacactttgtttatgggttatgtattttgttaatagtttcagactttggcgccgtgttaaaactttttgggcttttaatcctgaaactaatgcaatcatctctctccaggtttatggacataattattacttaccggtgatggctgcacctacaggtgttacattaacacttcttagtggtgtacttcttgttgatggccataagattgctactcgtgttcaagtgggtcagttgcctaaatatgtaatagttgctacacctagtaccacaattgtttgtgaccgtgttggtcgctctgttaatgaaacaagccagactggttgggcattctacgtccgtgctaaacatggtgatttttctggtgttgcctctcaggagggtgttttgtcagaaagagagaagttgcttcatttaatctaaactaaacaaaatggctagtgtaaattgggccgatgacagagctgctaggaagaaatttcctcctccttcattttacatgcctcttttggttagttctgataaggcaccatatagggtcattcccaggaatcttgtccctattggtaagggtaataaagatgagcagattggttattggaatgttcaagagcgttggcgtatgcgcagggggcaacgtgttgatttgcctcctaaagttcatttttattacctaggtactggacctcataaggaccttaaattcagacaacgttctgatggtgttgtttgggttgctaaggaaggtgctaaaactgttaataccagtcttggtaatcgcaaacgtaatcagaaacctttggaaccaaagttctctattgctttgcctccagagctctctgttgttgagtttgaggatcgctctaataactcatctcgtgctagcagtcgttcttcaactcgtaacaactcacgagactcttctcgtagtacttcaagacaacagtctcgcactcgttctgattctaaccagtcttcttcagatcttgttgctgctgttactttggctttaaagaacttaggttttgataaccagtcgaagtcacctagttcttctggtacttccactcctaagaaacctaataagcctctttctcaacccagggctgataagccttctcagttgaagaaacctcgttggaagcgtgttcctaccagagaggaaaatgttattcagtgctttggtcctcgtgattttaatcacaatatgggggattcagatcttgttcagaatggtgttgatgccaagggttttccacagcttgctgaattgattcctaatcaggctgcgttattctttgatagtgaggttagcactgatgaagtgggtgataatgttcagattacctacacctacaaaatgcttgtagctaaggataataagaaccttcctaagttcattgagcagattagtgcttttactaaacccagttctatcaaagaaatgcagtcacaatcatctcatgttgctcagaacacagtacttaatgcttctattccagaatctaaaccattggctgatgatgattcagccattatagaaattgtcaacgaggttttgcattaaattgttttgtaattccagttgaatgtttattattattagttgcaaccccatgcgtttagcgcatgataagggtttagtcttacacacaatggtaggccagtgatagtaaagtgtaagtaatttgctatcatattaacatgtctagaggaaagtcagaactttttctgtttgtgttgttggagtacttaaagatcgcataggcgcgccaacaatggaagagccaacaacatatctaaaaatgttttgtctggtacttgttaatgatattgtttttgatatggatacacaaaaaaaaaaaaaa

SEQ ID NO: 2 - protein, 4055 aa, EMCR Coronavirus
MFYNQVTLAVASDSEISGFGFAIPSVAVRAYSEAAAQGFQACRFVAFGLQDCVTGINDDDYVIALTGTNQLCAKILLFSDRPLNLRGWLIFSNSNYVLQDFDVVFGHGAGSVVFVDKYMCGFDGKPVLPKNMWEFRDYFNDNTDSIVIGGVTYQLAWDVIRKDLSYEQQNVLAIESIHYLGTTGHTLKSGCKLINAKPPKYSSKVVLSGEWNAVYKAFGSPFITNGISLLDIIVKPVFFNAFVKCNCGSENWSVGAWDGYLSSCCGTPAKKLCVVPGNVVPGDVIITSTDAGCGVKYYAGLVVKHITNITGVSLWRVTAVHSDGMFVATSSYDALLHRNSLDPFCFDVNTLLSNQLRLAFLGASVTEDVKFAASTGVIDISAGMFGLYDDILTNNKPWFVRKASGLFDAIWDAFVAAIKLVPTTTGGLVRFVKSIASTVLTVSNGVIIMCADVPDAFQPVYRTFTQAICAAFDFSLDVFKIGDVKFKRLGDYVLTENALVRLTTEVVRGVRDARIKKAMFTKVVVGPTTEVKFSVIELATVNLRLVDCAPVVCPKGKIVVIAGQAFFYSGGFYRFMVDSTTVLNDPVFTGELFYTIKFSGFKLDGFNHQFVNASSATDAIIAVELLLSDFKTAVFVYTCVVDGCSVIVRRDATFATHVCFKDCYSIWEQFCIDNCGEPWFLTDYNAILQSNNPQCAIVQASESKVLLERFLPKCPEILLSIDDGHLWNLFVEKFNFVTDWLKTLKLTLTSNGLLGNCAKRFRRVLVKLLDVYNGFLETVCSVVHTAGVCIKYYAVNVPYVVISGFVSRVIRRERCDVTFPCVSCVTFFYEFLDTCFGVSKPNAIDVEHLELKETVFVEPKDGGQFFVSDDYLWYVVDDIYYPASCNGVLPVAFTKLAGGKISFSDDVIVHDVEPTHKVKLIFEFEDDVVTSLCKKSFGKSIIYTGDWEGLHEVLTSAMNVIGQHIKLPQFYIYDEEGGYDVSKPVMISQWPISDDSDGCVVEASTDFHQLESVREEVDIIEQPFGEVEHALSIRQPFSFSFRDELGVRVLDQSDNNCWISTTLIQLQLTKLLDDSIEMQLFKVGKVDSIVQKCYELSHLISGSLGDSGKLLSELLKDKYTCSITFEMSCDCGKKFDEQVGCLFWIMPYTKLFQKGECCICHKMQTYKLVSMKGTGVFVQDPAPIDIDAFPVRPICSSVYLGVKGSGHYQTNLYSFDKAIDGFGVFDIKNSSVNTVCFVDVDFHSVEIEAGEVKPFAVYKNVKFYLGDISHLVNCVSFDFVVNAANENLMHGGGVARAIDILTEGQLQSLSKDYISSNGPLKVGAGVMLECEKFNVFNVVGPRTGKHEHSLLVEAYNSILFENGIPLMPLLSCGIFGVRIENSLKALFSCDINKPLQVFVYSSNEEQAVLKFLDGLDLTPVIDDVDVVKPFRVEGNFSFFDCGVNALDGDIYLLFTNSILMLDKQGQLLDTKLNGILQQAVLDYLATVKTVPAGNLVKLVVESCTIYMCVVPSINDLSFDKNLGRCVRKLNRLKTCVIANVPAIDVLKKLLSSLTLTVKFVVESNVMDVNDCFKNDNVVLKITEDGINVKDVVVESSKSLGKQLGVVSDGVDSFEGVLPINTDTVLSVAPEVDWVAFYGFEKAALFASLDVKPYGYPNDFVGGFRVLGTTDNNCWVNATCIILQYLKPTFKSKGLNVLWNKFVTGDVGPFVSFIYFITMSSKGQKGDAEEALSKLSEYLISDSIVTLEQYSTCDICKSTVVEVKSAVVCASVLKDGCDVGFCPHRHKLRSRVKFVNGRVVITNVGEPIISQPSKLLNGIAYTTFSGSFDNGHYVVYDAANNAVYDGARLFASDLSTLAVTAIVVVGGCVTSNVPPIVSEKISVMDKLDTGAQKFFQFGDFVMNNIVLFLTWLLSMFSLLRTSIMKHDIKVIAKAPKRTGVILTRSFKYNIRSALFVVKQKWCVIVTLFKFLLLLYAIYALVFMIVQFSPFNSLLCGDIVSGYEKSTFNKDIYCGNSMVCKMCLFSYQEFNDLDHTSLVWKHIRDPILISLQPFVILVILLIFGNMYLRFGLLYFVAQFISTFGSFLGFHQKQWFLHFVPFDVLCNEFLATFIVCKIVLFVRHIIVGCNNADCVACSKSARLKRVPLQTIINGMHKSFYVNANGGTCFCNKHNFFCVNCDSFGPGNTFINGDIARELGNVVKTAVQPTAPAYVIIDKVDFVNGFYRLYSGDTFWRYDFDITESKYSCKEVLKNCNVLENFIVYNNSGSNITQIKNACVYFSQLLCEPIKLVNSELLSTLSVDFNGVLHKAYVDVLCNSFFKELTANMSMAECKATLGLTVSDDDFVSAVANAHRYDVLLSDLSFNNFFISYAKPEDKLSVYDIACCMRAGSKVVNHNVLIKESIPIVWGVKDFNTLSQEGKKYLVKTTKAKGLTFLLTFNDNQAITQVPATSIVAKQGAGFKRTYNFLWYVCLFVVALFIGVSFIDYTTTVTSFHGYDFKYIENGQLKVFEAPLHCVRNVFDNFNQWHEAKFGVVTTNSDKCPIVVGVSERINVVPGVPTNVYLVGKTLVFTLQAAFGNTGVCYDFDGVTTSDKCIFNSACTRLEGLGGDNVYCYNTDLIEGSKPYSILQPNAYYKYDVKNYVRFPEILARGFGLRTIRTLATRYCRVGECRDSHKGVCFGFDKWYVNDGRVDDGYICGDGLIDLLVNVLSIFSSSFSVVAMSGHMLFNFLFAAFITFLCFLVTKFKRVFGDLSYGVFTVVCATLINNISYVVTQNLFFMLLYAILYFVFTRTVRYAWIWHIAYIVAYFLLIPWWLLTWFSFAAFLELLPNVFKLKISTQLFEGDKFIGTFESAAAGTFVLDMRSYERLINTISPEKLKNYAASYNKYKYYSGSASEADYRCACYAHLAKAMLDYAKDHNDMLYSPPTISYNSTLQSGLKKMAQPSGCVERCVVRVCYGSTVLNGVWLGDTVTCPRHVIAPSTTVLIDYDHAYSTMRLHNFSVSHNGVFLGVVGVTMHGSVLRIKVSQSNVHTPKHVFKTLKPGASFNILACYEGIASGVFGVNLRTNFTIKGSFINGACGSPGYNVRNDGTVEFCYLHQIELGSGAHVGSDFTGSVYGNFDDQPSLQVESANLMLSDNVVAFLYAALLNGCRWWLRSTRVNVDGFNEWAMANGYTIVSSVECYSILAAKTGVSVEQLLASIQHLHEGFGGKNILGYSSLCDEFTLAEVVKQMYGVNLQSGKVIFGLKTMFLFSVFFTMFWAELFIYTNTIWINPVILTPIFCLLLFLSLVLTMFLKHKFLFLQVFLLPTVIATALYNCVLDYYIVKFLADHFNYNVSVLQMDVQGLVNVLVCLFVVFLHTWRFSKERFTHWFTYVCSLIAVAYTYFYSGDFLSLLVMFLCAISSDWYIGAIVFRLSRLIIFFSPESVFSVFGDVKLTLVVYLICGYLVCTYWGILYWFNRFFKCTMGVYDFKVSAAEFKYMVANGLHAPYGPFDALWLSFKLLGIGGDRCIKISTVQSKLTDLKCTNVVLLGCLSSMNIAANSSEWAYCVDLHNKINLCDDPEKAQGMLLALLAFFLSKHSDFGLDGLIDSYFDNSSTLQSVASSFVSMPSYIAYENARQAYEDAIANGSSSQLIKQLKRAMNIAKSEFDHEISVQKKINRMAEQAATQMYKEARSVNRKSKVISAMHSLLFGMLRRLDMSSVETVLNLARDGVVPLSVIPATSASKLTIVSPDLESYSKIVCDGSVHYAGVVWTLNDVKDNDGRPVHVKEITRENVETLTWPLILNCERVVKLQNNEIMPGKLKQKPMKAEGDGGVLGDGNALYNTEGGKTFMYAYISNKADLKFVKWEYEGGCNTIELDSPCRFMVETPNGPQVKYLYFVKNLNTLRRGAVLGFIGATIRLQAGKQTELAVNSGLLTACAFSVDPATTYLEAVKHGAKPVSNCIKMLSNGAGNGQAITTSVDANTNQDSYGGASICLYCRAHVPHPSMDGYCKFKGKCVQVPIGCLDPIRFCLENNVCNVCGCWLGHGCACDRTTIQSVDISYLNEQGVLVQLD

SEQ ID NO: 3 - protein, 1355 aa, EMCR Coronavirus
MKLFLILLILPLVSCFSTCNSNASISMLQLGVPDNSSTIVTGLLPVHWICANQSTSSYPANGFFYIDVGKHRSAFALHSGYYDANQYYIYLTNKIHLNAPVTLKICKFGNTSFDFLSNVSTSHDCIVNLSFTEQLGVPLGITISGETVRLHLYNATRTFYVPAAYKLTKLSVKCYFSESCVFSVVNATITVNVTTLNGRIVNYTVCDDCNGYTDNIFSVQQDGRIPNGFPFNNWFLLTNGSTLVDGVSRLYQPLRLTCLWPVPGLKSSTGFVYFNATGSDVNCNGYQHNSVADVMRYNLNLSANSVDNLKSGVIVFKTLQYDVLFYCSNSSSGVLDTTIPFGPSSQPYYCFINSTINTTHVSTFVGILPPTVREIVVARTGQFYINGFKYFDLGFIEAVNFNVTTASATDFWTVAFATFVDVLVNVSATNIQNLLYCDSPFEKLQCEHLQFGLQDGFYSANFLDDNVLPETYVALPIYYQHTDINFTATASFGGSCYVCKPRQVNISLNGNTSVCVRTSHFSIRYIYNRVKSGSPGDSSWHIYLKSGTCPFSFSKLNNFQKFKTICFSTVEVPGSCNFPLEATWHYTSYTIVGALYVTWSEGNSITGVPYPVSGIREFSNLVLNNCTKYNIYDYVGTGIIRSSNQSLAGGITYVSNSGNLLGFKNVSTGNIFIVTPCNQPDQVAVYQQSIIGAMTAVNESRYGLQNLLQLPNFYYVSNGGNNCTTAVMIYSNFGICADGSLIPVRPRNSSDNGISAIITANLSIPSNWTTSVQVEYLQITSTPIVVDCATYVCNGNPRCKNLLKQYTSACKTIEDALRLSAHLETNDVSSMLTFDSNAFSLANVTSFGDYNLSSVLPQRNIHSSRIAGRSALEDLLFSKVVTSGLGTVDVDYKSCTKGLSIADLACAQYYNGIMVLPGVADAERMAMYTGSLIGGMVLGGLTSAAAIPFSLALQARLNYVALQTDVLQENQKILAASFNKAINNIVASFSSVNDAITHTAEAIHTVTIALNKIQDVVNQQGSALNHLTSQLRHNFQAISNSIHAIYDRLDSIQADQQVDRLITGRLAALNAFVSQVLNKYTEVRGSRRLAQQKINECVKSQSNRYGFCGNGTHIFSIVNSAPDGLLFLHTVLLPTDYKNVKAWSGICVDGIYGYVLRQPNLVLYSDNGVFRVTSRVMFQPRLPVLSDFVQIYNCNVTFVNISRVELHTVIPDYVDVNKTLQEFAQNLPKYVKPNFDLTPFNLTYLNLSSELKQLEAKTASLFQTTVELQGLIDQINSTYVDLKLLNRFENYIKWPWWVWLIISVVFVVLLSLLVFCCLSTGCCGCCNCLTSSMRGCCDCGSTKLPYYEFEKVHVQ

SEQ ID NO: 4 - protein, 77 aa, EMCR Coronavirus
MFLRLIDDNGIVLNSILWLLVMIFFFVLAMTFIKLIQLCFTCHYFFSRTLYQPVYKIFLAYQDYMQIAPVPAEVLNV

SEQ ID NO: 5 - protein, 226 aa, EMCR Coronavirus
MSNSSVPLSEVYVHLRNWNFSWNLILTVFIVVLQYGHYKYSRLLYGLKMSVLWCLWPLVLALSIFDCFVNFNVDWVFFGFSILMSIITLCLWVMYFVNSFRLWRRVKTFWAFNPETNAIISLQVYGHNYYLPVMAAPTGVTLTLLSGVLLVDGHKIATRVQVGQLPKYVIVATPSTTIVCDRVGRSVNETSQTGWAFYVRAKHGDFSGVASQEGVLSEREKLLHLI

SEQ ID NO: 6 - protein, 377 aa, EMCR Coronavirus
MASVNWADDRAARKKFPPPSFYMPLLVSSDKAPYRVIPRNLVPIGKGNKDEQIGYWNVQERWRMRRGQRVDLPPKVHFYYLGTGPHKDLKFRQRSDGVVWVAKEGAKTVNTSLGNRKRNQKPLEPKFSIALPPELSVVEFEDRSNNSSRASSRSSTRNNSRDSSRSTSRQQSRTRSDSNQSSSDLVAAVTLALKNLGFDNQSKSPSSSGTSTPKKPNKPLSQPRADKPSQLKKPRWKRVPTREENVIQCFGPRDFNHNMGDSDLVQNGVDAKGFPQLAELIPNQAALFFDSEVSTDEVGDNVQITYTYKMLVAKDNKNLPKFIEQISAFTKPSSIKEMQSQSSHVAQNTVLNASIPESKPLADDDSAIIEIVNEVLH

SEQ ID NO: 7 - DNA, 27530 bp, EMCR Coronavirus; identical to SEQ ID NO: 1
  CDS (12402)..(20438): Replicase 1b
  CDS (24502)..(25182): ORF 4ab

SEQ ID NO: 8 - protein, 2678 aa, EMCR Coronavirus
  misc_feature (844)..(844): The 'Xaa' at location 844 stands for Glu.
RARGSSAARLEPCNGTDIDKCVRAFDIYNKNVSFLGKCLKMNCVRFKNADLKDGYFVIKRCTKSVMEHEQSMYNLLNFSGALAEHDFFTWKDGRVIYGNVSRHNLTKYTMMDLVYAMRNFDEQNCDVLKEVLVLTGCCDNSYFDSKGWYDPVENEDIHRVYASLGKIVARAMLKCVALCDAMVAKGVVGVLTLDNQDLNGNFYDFGDFVVSLPNMGVPCCTSYYSYMMPIMGLTNCLASECFVKSDIFGSDFKTFDLLKYDFTEHKENLFNKYFKHWSFDYHPNCSDCYDDMCVIHCANFNTLFATTIPGTAFGPLCRKVFIDGVPLVTTAGYHFKQLGLVWNKDVNTHSVRLTITELLQFVTDPSLIIASSPALVDQRTICFSVAALSTGLTNQVVKPGHFNEEFYNFLRLRGFFDEGSELTLKHFFFAQNGDAAVKDFDFYRYNKPTILDICQARVTYKIVSRYFDIYEGGCIKACEVVVTNLNKSAGWPLNKFGKASLYYESISYEEQDALFALTKRNVLPTMTQLNLKYAISGKERARTVGGVSLLSTMTTRQYHQKHLKSIVNTRNATVVIGTTKFYGGWNNMLRTLIDGVENPMLMGWDYPKCDRALPNMIRMISAMVLGSKHVNCCTVTDRFYRLGNELAQVLTEVVYSNGGFYFKPGGTTSGDASTAYANSIFNIFQAVSSNINRLLSVPSDSCNNVNVRDLQRRLYDNCYRLTSVEESFIDDYYGYLRKHFSMMILSDDGVVCYNKDYAELGYIADISAFKATLYYQNNVFMSTSKCWVEEDLTKGPHEFCSQHTMQIVDKDGTYYLPYPDPSRILSAGVFVDDVVKTDAVVLLXRYVSLAIDAYPLSKHPNSEYRKVFYVLLDWVKHLNKNLNEGVLESFSVTLLDNQEDKFWCEDFYASMYENSTILQAAGLCVVCGSQTVLRCGDCLRKPMLCTKCAYDHVFGTDHKFILAITPYVCNASGCGVSDVKKLYLGGLNYYCTNHKPQLSFPLCSAGNIFGLYKNSATGSLDVEVFNRLATSDWTDVRDYKLANDVKDTLRLFAAETIKAKEESVKSSYAFATLKEVVGPKELLLSWESGKVKPPLNRNSVFTCFQISKDSKFQIGEFIFEKVEYGSDTVTYKSTVTTKLVPGMIFVLTSHNVQPLRAPTIANQEKYSSIYKLHPAFNVSDAYANLVPYYQLIGKQKITTIQGPPGSGKSHCSIGLGLYYPGARIVFVACAHAAVDSLCAKAMTVYSIDKCTRIIPARARVECYSGFKPNNTSAQYIFSTVNALPECNADIVVVDEVSMCTNYDLSVINQRLSYKHIVYVGDPQQLPAPRVMITKGVMEPVDYNVVTQRMCAIGPDVFLHKCYRCPAEIVNTVSELVYENKFVPVKPASKQCFKIFFKGNVQVDNGSSINRKQLEIVKLFLVKNPSWSKAVFISPYNSQNYVASRFLGLQIQTVDSSQGSEYDYVIYAQTSDTAHACNVNRFNVAITRAKKGIFCVMCDKTLFDSLKFFEIKHADLHSSQVCGLFKNCTRTPLNLPPTHAHTFLSLSDQFKTTGDLAVQIGSNNVCTYEHVISFMGFRFDISIPGSHSLFCTRDFAIRNVRGWLGMDVESAHVCGDNIGTNVPLQVGFSNGVNFVVQTEGCVSTNFGDVIKPVCAKSPPGEQFRHLVPFLRKGQPWLIVRRRIVQMISDYLSNLSDILVFVLWAGSLELTTMRYFVKIGPIKYCYCGNSATCYNSVSNEYCCFKHALGCDYVYNPYAFDIQQWGYVGSLSQNHHTFCNIHRNEHDASGDAVMTRCLAVHDCFVKNVDWTVTYPFIANEKFINGCGRNVQGHVVRAALKLYKPSVIHDIGNPKGVRCAVTDAKWYCYDKQPVNSNVKLLDYDYATHGQLDGLCLFWNCNVDMYPEFSIVCRFDTRTRSVFNLEGVNGGSLYVNKHAFHTPAYDKRAFVKLKPMPFFYFDDSDCDVVQEQVNYVPLRASSCVTRCNIGGAVCSKHANLYQKYVEAYNTFTQAGFNIWVPHSFDVYNLWQIFIETNLQSLENIAFNVVKKGCFTGVDGELPVAVVNDKVFVRYGDVDNLVFTNKTTLPTNVAFELFAKRKMGLTPPLSILKNLGVVATYKFVLWDYEAERPFTSYTKSVCKYTDFNEDVCVCFDNSIQGSYERFTLTTNAVLFSTVVIKNLTPIKLNFGMLNGMPVSSIKSDKGVEKLVNWYTYVRKNGQFQDHYDGFYTQGRNLSDFTPRSDMEYDFLNMDMGVFINKYGLEDFNFEHVVYGDVSKTTLGGLHLLISQFRLSKMGVLKADDFVTASDTTLRCCTVTYLNELSSKVVCTYMDLLLDDFVTILKSLDLGVISKVHEVIIDNKPYRWMLWCKDNHLSTFYPQLQSAEWKCGYAMPQIYKLQRMCLEPCNLYNYGAGIKLPSGIMLNVVKYTQLCQYLNSTTMCVPHNMRVLHYGAGSDKGVAPGTTVLKRWLPPDAIIIDNDINDYVSDADFSITGDCATVYLEDKFDLLISDMYDGRIKFCDGENVSKDGFFTYLNGVIREKLAIGGSVAIKITEYSWNKYLYELIQRFAFWTLFCTSVNTSSSEAFLIGINYLGDFIQGPFIAGNTVHANYIFWRNSTIMSLSYNSVLDLSKFECKHKATVVVTLKDSDVNDMVLSLIKSGRLLLRNSGRFGGFSNHLVSTK

SEQ ID NO: 9 - protein, 226 aa, EMCR Coronavirus
MPFGGLFQLTLESTINKSVANLKLPPHDVTVLRDNLKPVTTLSTITAYLLVSLFVTYFALFKPLTARGRVACFVLKLLTLSVYVPLLVLFGMYLDSFIIFFLRCCFDSYMLAIMPISNKNFSFVLFNVTKLCFVSGKCWYLEQSFYENRFAAIYGGDHYVVLGGETITFVSFDDLYVAIRGSCEKNLQLMRKVDLYNGAVIYIFAEEPVVGIVYSSQLYEDVPSIN

SEQ ID NO: 10 - DNA, 292 bp, Coronavirus 229E
  5'UTR (1)..(292)
acttaagtaccttatctatctacagatagaaaagttgctttttagactttgtgtctacttttctcaactaaacgaaatttttgctatggccggcatctttgatgctggagtcgtagtgtaattgaaatttcatttgggttgcaacagtttggaagcaagtgctgtgtgtcctagtctaagggtttcgtgttccgtcacgagattccattctacaaacgccttactcgaggttccgtctcgtgtttgtgtggaagcaaagttctgtctttgtggaaaccagtaactgttccta

SEQ ID NO: 11 - protein, 3951 aa, avian infectious bronchitis virus
  MISC_FEATURE: ORF1A
MASSLKQGVSPKPRDVILVSKDIPEQLCDALFFYTSHNPKDYADAFAVRQKFDRSLQTGKQFKFETVCGLFLLKGVDKITPGVPAKVLKATSKLADLEDIFGVSPLARKYRELLKTACQWSLTVEALDVRAQTLDEIFDPTEILWLQVAAKIHVSSMAMRRLVGEVTAKVMDALGSNLSALFQIVKQQIARIFQKALAIFENVNELPQRIAALKMAFAKCARSITVVVVERTLVVKEFAGTCLASINGAVAKFFEELPNGFMGSKIFTTLAFFKEAAVRVVENIPNAPRGTKGFEVVGNAKGTQVVVRGMRNDLTLLDQKADIPVEPEGWSAILDGHLCYVFRSGDRFYAAPLSGNFALSDVHCCERVVCLSDGVTPEINDGLILAAIYSSFSVSELVTALKKGEPFKFLGHKFVYAKDAAVSFTLAKAATIADVLRLFQSARVIAEDVWSSFTEKSFEFWKLAYGKVRNLEEFVKTYVCKAQMSIVILAAVLGEDIWHLVSQVIYKLGVLFTKVVDFCDKHWKGFCVQLKRAKLIVTETFCVLKGVAQHCFQLLLDAIHSLYKSFKKCALGRIHGDLLFWKGGVHKIVQDGDEIWFDAIDSVDVEDLGVVQEKSIDFEVCDDVTLPENQPGHMVQIEDDGKNYMFFRFKKDENIYYTPMSQLGAINVVCKAGGKTVTFGETTVQEIPPPDVVPIKVSIECCGEPWNTIFKKAYKEPIEVDTDLTVEQLLSVIYEKMCDDLKLFPEAPEPPPFENVALVDKNGKDLDCIKSCHLIYRDYESDDDIEEEDAEECDTDSGEAEECDTNSECEEEDEDTKVLALIQDPASIKYPLPLDEDYSVYNGCIVHKDALDVVNLPSGEETFVVNNCFEGAVKPLPQKVVDVLGDWGEAVDAQEQLCQQEPLQHTFEEPVENSTGSSKTMTEQVVVEDQELPVVEQDQDVVVYTPTDLEVAKETAEEVDEFILIFAVPKEEVVSQKDGAQIKQEPIQVVKPQREKKAKKFKVKPATCEKPKFLEYKTCVGDLTVVIAKALDEFKEFCIVNAANEHMTHGSGVAKAIADFCGLDFVEYCEDYVKKHGPQQRLVTPSFVKGIQCVNNVVGPRHGDNNLHEKLVAAYKNVLVDGVVNYVVPVLSLGIFGVDFKMSIDAMREAFEGCTIRVLLFSLSQEHIDYFDVTCKQKTIYLTEDGVKYRSIVLKPGDSLGQFGQVYAKNKIVFTADDVEDKEILYVPTTDKSILEYYGLDAQKYVIYLQTLAQKWNVQYRDNFLILEWRDGNCWISSAIVLLQAAKIRFKGFLTEAWAKLLGGDPTDFVAWCYASCTAKVGDFSDANWLLANLAEHFDADYTNAFLKKRVSCNCGIKSYELRGLEACIQPVRATNLLHFKTQYSNCPTCGANNTDEVIEASLPYLLLFATDGPATVDCDEDAVGTVVFVGSTNSGHCYTQAAGQAFDNLAKDRKFGKKSPYITAMYTRFAFKNETSLPVAKQSKGKSKSVKEDVSNLATSSKASFDNLTDFEQWYDSNIYESLKVQESPDNFDKYVSFTTKEDSKLPLTLKVRGIKSVVDFRSKDGFIYKLTPDTDENSKAPVYYPVLDAISLKAIWVEGNANFVVGHPNYYSKSLHIPTFWENAENFVKMGDKIGGVTMGLWRAEHLNKPNLERIFNIAKKAIVGSSVVTTQCGKLIGKAATFIADKVGGGVVRNITDSIKGLCGITRGHFERKMSPQFLKTLMFFLFYFLKASVKSVVASYKTVLCKVVLATLLIVWFVYTSNPVMFTGIRVLDFLFEGSLCGPYKDYGKDSFDVLRYCADDFICRVCLHDKDSLHLYKHAYSVEQVYKDAASGFIFNWNWLYLVFLILFVKPVAGFVIICYCVKYLVLNSTVLQTGVCFLDWFVQTVFSHFNFMGAGFYFWLFYKIYIQVHHILYCKDVTCEVCKRVARSNRQEVSVVVGGRKQIVHVYTNSGYNFCKRHNWYCRNCDDYGHQNTFMSPEVAGELSEKLKRHVKPTAYAYHVVDEACLVDDFVNLKYKAATPGKDSASSAVKCFSVTDFLKKAVFLKEALKCEQISNDGFIVCNTQSAHALEEAKNAAIYYAQYLCKPILILDQALYEQLVVEPVSKSVIDKVCSILSSIISVDTAALNYKAGTLRDALLSITKDEEAVDMAIFCHNHDVDYTGDGFTNVIPSYGIDTGKLTPRDRGFLINADASIANLRVKNAPPVVWKFSELIKLSDSCLKYLISATVKSGVRFFITKSGAKQVIACHTQKLLVEKKAGGIVSGTFKCFKSYFKWLLIFYILFTACCSGYYYMEVSKSFVHPMYDVNSTLHVEGFKVIDKGVLREIVPEDTCFSNKFVNFDAFWGRPYDNSRNCPIVTAVIDGDGTVATGVPGFVSWVMDGVMFIHMTQTERKPWYIPTWFNREIVGYTQDSIITEGSFYTSIALFSARCLYLTASNTPQLYCFNGDNDAPGALPFGSIIPHRVYFQPNGVRLIVPQQILHTPYVVKFVSDSYCRGSVCEYTRPGYCVSLNPQWVLFNDEYTSKPGVFCGSTVRELMFSMVSTFFTGVNPNIYMQLATMFLILVVVVLIFAMVIKFQGVFKAYATTVFITMLVWVINAFILCVHSYNSVLAVILLVLYCYASLVTSRNTVIIMHCWLVFTFGLIVPTWLACCYLGFIIYMYTPLFLWCYGTTKNTRKLYDGNEFVGNYDLAAKSTFVIRGSEFVKLTNEIGDKFEAYLSAYARLKYYSGTGSEQDYLQACRAWLAYALDQYRNSGVEIVYTPPRYSIGVSRLQSGFKKLVSPSSAVEKCIVSVSYRGNNLNGLWLGDTIYCPRHVLGKFSGDQWNDVLNLANNHEFEVTTQHGVTLNVVSRRLKGAVLILQTAVANAETPKYKFIKANCGDSFTIACAYGGTVVGLYPVTMRSNGTIRASFLAGACGSVGFNIEKGVVNFFYMHHLELPNALHTGTDLMGEFYGGYVDEEVAQRVPPDNLVTNNIVAWLYAAIISVKESSFSLPKWLESTTVSVDDYNKWAGDNGFTPFSTSTAITKLSAITGVDVCKLLRTIMVKNSQWGGDPILGQYNFEDELTPESVFNQIGGVRLQSSFVRKATSWFWSRCVLACFLFVLCAIVLFTAVPLKFYVYAAVILLMAVLFISFTVKHVMAYMDTFLLPTLITVIIGVCAEVPFIYNTLISQVVIFLSQWYDPVVFDTMVPWMFLPLVLYTAFKCVQGCYMNSFNTSLLMLYQFVKLGFVIYTSSNTLTAYTEGNWELFFELVHTTVLANVSSNSLIGLFVFKCAKWMLYYCNATYLNNYVLMAVMVNCIGWLCTCYFGLYWWVNKVFGLTLGKYNFKVSVDQYRYMCLHKINPPKTVWEVFSTNILIQGIGGDRVLPIATVQAKLSDVKCTTVVLMQLLTKLNVEANSKMHVYLVELHNKILASDDVGECMDNLLGMLITLFCIDSTIDLSEYCDDILKRSTVLQSVTQEFSHIPSYAEYERAKNLYEKVLVDSKNGGVTQQELAAYRKAANIAKSVFDRDLAVQKKLDSMAERAMTTMYKEARVTDRRAKLVSSLHALLFSMLKKIDSEKLNVLFDQASSGVVPLATVPIVCSNKLTLVIPDPETWVKCVEGVHVTYSTVVWNIDTVIDADGTELHPTSTGSGLTYCISGANIAWPLKVNLTRNGHNKVDVVLQNNELMPHGVKTKACVAGVDQAHCSVESKCYYTNISGNSVVAAITSSNPNLKVASFLNEAGNQIYVDLDPPCKFGMKVGVKVEVVYLYFIKNTRSIVRGMVLGAISNVVVLQSKGHETEEVDAVGILSLCSFAVDPADTYCKYVAAGNQPLGNCVKMLTVHNGSGFAITSKPSPTPDQDSYGGASVCLYCRAHIAHPGSVGNLDGRCQFKGSFVQIPTTEKDPVGFCLRNKVCTVCQCWIGYGCQCDSLRQPKSSVQSVAGASDFDKNYLNGYGVAVRLG

SEQ ID NO: 12 - protein, 4085 aa, human coronavirsu 229E
  MISC_FEATURE: ORF 1A
MACNRVTLAVASDSEISANGCSTIAQAVRRYSEAASNGFRACRFVSLDLQDCIVGIADDTYVMGLHGNQTLFCNIMKFSDRPFMLHGWLVFSNSNYLLEEFDVVFGKRGGGNVTYTDQYLCGADGKPVMSEDLWQFVDHFGENEEIIINGHTYVCAWLTKRKPLDYKRQNNLAIEEIEYVHGDALHTLRNGSVLEMAKEVKTSSKVVLSDALDKLYKVFGSPVMTNGSNILEAFTKPVFISALVQCTCGTKSWSVGDWTGFKSSCCNVISNKLCVVPGNVKPGDAVITTQQAGAGIKYFCGMTLKFVANIEGVSVWRVIALQSVDCFVASSTFVEEEHVNRMDTFCFNVRNSVTDECRLAMLGAEMTSNVRRQVASGVIDISTGWFDVYDDIFAESKPWFVRKAEDIFGPCWSALASALKQLKVTTGELVRFVKSICNSAVAVVGGTIQILASVPEKFLNAFDVFVTAIQTVFDCAVETCTIAGKAFDKVFDYVLLDNALVKLVTTKLKGVRERGLNKVKYATVVVGSTEEVKSSRVERSTAVLTIANNYSKLFDEGYTVVIGDVAYFVSDGYFRLMASPNSVLTTAVYKPLFAFNVNVMGTRPEKFPTTVTCENLESAVLFVNDKITEFQLDYSIDVIDNEIIVKPNISLCVPLYVRDYVDKWDDFCRQYSNESWFEDDYRAFISVLDITDAAVKAAESKAFVDTIVPPCPSILKVIDGGKIWNGVIKNVNSVRDWLKSLKLNLTQQGLLGTCAKRFKRWLGILLEAYNAFLDTVVSTVKIGGLTFKTYAFDKPYIVIRDIVCKVENKTEAEWIELFPHNDRIKSFSTFESAYMPIADPTHFDIEEVELLDAEFVEPGCGGILAVIDEHVFYKKDGVYYPSNGTNILPVAFTKAAGGKVSFSDDVEVKDIEPVYRVKLCFEFEDEKLVDVCEKAIGKKIKHEGDWDSFCKTIQSALSVVSCYVNLPTYYIYDEEGGNDLSLPVMISEWPLSVQQAQQEATLPDIAEDVVDQVEEVNSIFDIETVDVKHDVSPFEMPFEELNGLKILKQLDNNCWVNSVMLQIQLTGILDGDYAMQFFKMGRVAKMIERCYTAEQCIRGAMGDVGLCMYRLLKDLHTGFMVMDYKCSCTSGRLEESGAVLFCTPTKKAFPYGTCLNCNAPRMCTIRQLQGTIIFVQQKPEPVNPVSFVVKPVCSSIFRGAVSCGHYQTNIYSQNLCVDGFGVNKIQPWTNDALNTICIKDADYNAKVEISVTPIKNTVDTTPKEEFVVKEKLNAFLVHDNVAFYQGDVDTVVNGVDFDFIVNAANENLAHGGGLAKALDVYTKGKLQRLSKEHIGLAGKVKVGTGVMVECDSLRIFNVVGPRKGKHERDLLIKAYNTINNEQGTPLTPILSCGIFGIKLETSLEVLLDVCNTKEVKVFVYTDTEVCKVKDFVSGLVNVQKVEQPKIEPKPVSVIKVAPKPYRVDGKFSYFTEDLLCVADDKPIVLFTDSMLTLDDRGLALDNALSGVLSAAIKDCVDINKAIPSGNLIKFDIGSVVVYMCVVPSEKDKHLDNNVQRCTRKLNRLMCDIVCTIPADYILPLVLSSLTCNVSFVGELKAAEAKVITIKVTEDGVNVHDVTVTTDKSFEQQVGVIADKDKDLSGAVPSDLNTSELLTKAIDVDWVEFYGFKDAVTFATVDHSAFAYESAVVNGIRVLKTSDNNCWVNAVCIALQYSKPHFISQGLDAAWNKFVLGDVEIFVAFVYYVARLMKGDKGDAEDTLTKLSKYLANEAQVQLEHYSSCVECDAKFKNSVASINSAIVCASVKRDGVQVGYCVHGIKYYSRVRSVRGRAIIVSVEQLEPCAQSRLLSGVAYTAFSGPVDKGHYTVYDTAKKSMYDGDRFVKHDLSLLSVTSVVMVGGYVAPVNTVKPKPVINQLDEKAQKFFDFGDFLIHNFVIFFTWLLSMFTLCKTAVTTGDVKIMAKAPQRTGVVLKRSLKYNLKASAAVLKSKWWLLAKFTKLLLLIYTLYSVVLLCVRFGPFNFCSETVNGYAKSNFVKDDYCDGSLGCKMCLFGYQELSQFSHLDVVWKHITDPLFSNMQPFIVMVLLLIFGDNYLRCFLLYFVAQMISTVGVFLGYKETNWFLHFIPFDVICDELLVTVIVIKVISFVRHVLFGCENPDCIACSKSARLKRFPVNTIVNGVQRSFYVNANGGSKFCKKHRFFCVDCDSYGYGSTFITPEVSRELGNITKTNVQPTGPAYVMIDKVEFENGFYRLYSCETFWRYNFDITESKYSCKEVFKNCNVLDDFIVFNNNGTNVTQVKNASVYFSQLLCRPIKLVDSELLSTLSVDFNGVLHKAYIDVLRNSFGKDLNANMSLAECKRALGLSISDHEFTSAISNAHRCDVLLSDLSFNNFVSSYAKPEEKLSAYDLACCMRAGAKVVNANVLTKDQTPIVWHAKDFNSLSAEGRKYIVKTSKAKGLTFLLTINENQAVTQIPATSIVAKQGAGDAGHSLTWLWLLCGLVCLIQFYLCFFMPYFMYDIVSSFEGYDFKYIENGQLKNFEAPLKCVRNVFENFEDWHYAKFGFTPLNKQSCPIVVGVSEIVNTVAGIPSNVYLVGKTLIFTLQAAFGNAGVCYDIFGVTTPEKCIFTSACTRLEGLGGNNVYCYNTALMEGSLPYSSIQANAYYKYDNGNFIKLPEVIAQGFGFRTVRTIATKYCRVGECVESNAGVCFGFDKWFVNDGRVANGYVCGTGLWNLVFNILSMFSSSFSVAAMSGQILLNCALGAFAIFCCFLVTKFRRMFGDLSVGVCTVVVAVLLNNVSYIVTQNLVTMIAYAILYFFATRSLRYAWIWCAAYLIAYISFAPWWLCAWYFLAMLTGLLPSLLKLKVSTNLFEGDKFVGTFESAAAGTFVIDMRSYEKLANSISPEKLKSYAASYNRYKYYSGNANEADYRCACYAYLAKAMLDFSRDHNDILYTPPTVSYGSTLQAGLRKMAQPSGFVEKCVVRVCYGNTVLNGLWLGDIVYCPRHVIASNTTSAIDYDHEYSIMRLHNFSIISGTAFLGVVGATMHGVTLKIKVSQTNMHTPRHSFRTLKSGEGFNILACYDGCAQGVFGVNMRTNWTIRGSFINGACGSPGYNLKNGEVEFVYMHQIELGSGSHVGSSFDGVMYGGFEDQPNLQVESANQMLTVNVVAFLYAAILNGCTWWLKGEKLFVEHYNEWAQANGFTAMNGEDAFSILAAKTGVCVERLLHAIQVLNNGFGGKQILGYSSLNDEFSINEVVKQMFGVNLQSGKTTSMFKSISLFAGFFVMFWAELFVYTTTIWVNPGFLTPFMILLVALSLCLTFVVKHKVLFLQVFLLPSIIVAAIQNCAWDYHVTKVLAEKFDYNVSVMQMDIQGFVNIFICLFVALLHTWRFAKERCTHWCTYLFSLIAVLYTALYSYDYVSLLVMLLCAISNEWYIGAIIFRICRFGVAFLPVEYVSYFDGVKTVLLFYMLLGFVSCMYYGLLYWINRFCKCTLGVYDFCVSPAEFKYMVANGLNAPNGPFDALFLSFKLMGIGGPRTIKVSTVQSKLTDLKCTNVVLMGILSNMNIASNSKEWAYCVEMHNKINLCDDPETAQELLLALLAFFLSKHSDFGLGDLVDSYFENDSILQSVASSFVGMPSFVAYETARQEYENAVANGSSPQIIKQLKKAMNVAKAEFDRESSVQKKINRMAEQAAAAMYKEARAVNRKSKVVSAMHSLLFGMLRRLDMSSVDTILNMARNGVVPLSVIPATSAARLVVVVPDHDSFVKMMVDGFVHYAGVVWTLQEVKDNDGKNVHLKDVTKENQEILVWPLILTCERVVKLQNNEIMPGKMKVKATKGEGDGGITSEGNALYNNEGGRAFMYAYVTTKPGMKYVKWEHDSGVVTVELEPPCRFVIDTPTGPQIKYLYFVKNLNNLRRGAVLGYIGATVRLQAGKQTEFVSNSHLLTHCSFAVDPAAAYLDAVKQGAKPVGNCVKMLTNGSGSGQAITCTIDSNTTQDTYGGASVCIYCRAHVAHPTMDGFCQYKGKWVQVPIGTNDPIRFCLENTVCKVCGCWLNHGCTCDRTAIQSFDNSYLNESGALVPLD

SEQ ID NO: 13 - protein, 4017 aa, transmissible gastroeneteritis virus
  MISC_FEATURE: ORF 1A
MSSKQFKILVNEDYQVNVPSLPIRDVLQEIKYCYRNGFEGYVFVPEYCRDLVDCDRKDHYVIGVLGNGVSDLKPVLLTEPSVMLQGFIVRANCNGVLEDFDLKIARTGRGAIYVDQYMCGADGKPVIEGDFKDYFGDEDIIEFEGEEYHCAWTTVRDEKPLNQQTLFTIQEIQYNLDIPHKLPNCATRHVAPPVKKNSKIVLSEDYKKLYDIFGSPFMGNGDCLSKCFDTLHFIAATLRCPCGSESSGVGDWTGFKTACCGLSGKVKGVTLGDIKPGDAVVTSMSAGKGVKFFANCVLQYAGDVEGVSIWKVIKTFTVDETVCTPGFEGELNDFIKPESKSLVACSVKRAFITGDIDDAVHDCIITGKLDLSTNLFGNVGLLFKKTPWFVQKCGALFVDAWKVVEELCGSLTLTYKQIYEVVASLCTSAFTIVNYKPTFVVPDNRVKDLVDKCVKVLVKAFDVFTQIITIAGIEAKCFVLGAKYLLFNNALVKLVSVKILGKKQKGLECAFFATSLVGATVNVTPKRTETATISLNKVDDVVAPGEGYIVIVGDMAFYKSGEYYFMMSSPNFVLTNNVFKAVKVPSYDIVYDVDNDTKSKMIAKLGSSFEYDGDIDAAIVKVNELLIEFRQQSLCFRAFKDDKSIFVEAYFKKYKMPACLAKHIGLWNIIKKDSCKRGFLNLFNHLNELEDIKETNIQAIKNILCPDPLLDLDYGAIWYNCMPGCSDPSVLGSVQLLIGNGVKVVCDGCKGFANQLSKGYNKLCNAARNDIEIGGIPFSTFKTPTNTFIEMTDAIYSVIEQGKALSFRDADVPVVDNGTISTADWSEPILLEPAEYVKPKNNGNVIVIAGYTFYKDEDEHFYPYGFGKIVQRMYNKMGGGDKTVSFSEEVDVQEIAPVTRVKLEFEFDNEIVTGVLERAIGTRYKFTGTTWEEFEESISEELDAIFDTLANQGVELEGYFIYDTCGGFDIKNPDGIMISQYDINITADEKSEVSASSEEEEVESVEEDPENEIVEASEGAEGTSSQEEVETVEVADITSTEEDVDIVEVSAKDDPWAAAVDVQEAEQFNPSLPPFKTTNLNGKIILKQGDNNCWINACCYQLQAFDFFNNEAWEKFKKGDVMDFVNLCYAATTLARGHSGDAEYLLELMLNDYSTAKIVLAAKCGCGEKEIVLERAVFKLTPLKESFNYGVCGDCMQVNTCRFLSVEGSGVFVHDILSKQTPEAMFVVKPVMHAVYTGTTQNGHYMVDDIEHGYCVDGMGIKPLKKRCYTSTLFINANVMTRAEKPKQEFKVEKVEQQPIVEENKSSIEKEEIQSPKNDDLILPFYKAGKLSFYQGALDVLINFLEPDVIVNAANGDLKHMGGVARAIDVFTGGKLTERSKDYLKKNKSIAPGNAVFFENVIEHLSVLNAVGPRNGDSRVEAKLCNVYKAIAKCEGKILTPLISVGIFNVRLETSLQCLLKTVNDRGLNVFVYTDQERQTIENFFSCSIPVNVTEDNVNHERVSVSFDKTYGEQLKGTVVIKDKDVTNQLPSAFDVGQKVIKAIDIDWQAHYGFRDAAAFSASSHDAYKFEVVTHSNFIVHKQTDNNCWINAICLALQRLKPQWKFPGVRGLWNEFLERKTQGFVHMLYHISGVKKGEPGDAELMLHKLGDLMDNDCEIIVTHTTACDKCAKVEKFVGPVVAAPLAIHGTDETCVHGVSVNVKVTQIKGTVAITSLIGPIIGEVLEATGYICYSGSNRNGHYTYYDNRNGLVVDAEKAYHFNRDLLQVTTAIASNFVVKKPQAEERPKNCAFNKVAASPKIVQEQKLLAIESGANYALTEFGRYADMFFMAGDKILRLLLEVFKYLLVLFMCLRSTKMPKVKVKPPLAFKDFGAKVRTLNYMRQLNKPSVWRYAKLVLLLIAIYNFFYLFVSIPVVHKLTCNGAVQAYKNSSFIKSAVCGNSILCKACLASYDELADFQHLQVTWDFKSDPLWNRLVQLSYFAFLAVFGNNYVRCFLMYFVSQYLNLWLSYFGYVEYSWFLHVVNFESISAEFVIVVIVVKAVLALKHIVFACSNPSCKTCSRTARQTRIPIQVVVNGSMKTVYVHANGTGKFCKKHNFYCKNCDSYGFENTFICDEIVRDLSNSVKQTVYATDRSHQEVTKVECSDGFYRFYVGDEFTSYDYDVKHKKYSSQEVLKSMLLLDDFIVYSPSGSALANVRNACVYFSQLIGKPIKIVNSDLLEDLSVDFKGALFNAKKNVIKNSFNVDVSECKNLDECYRACNLNVSFSTFEMAVNNAHRFGILITDRSFNNFWPSKVKPGSSGVSAMDIGKCMTSDAKIVNAKVLTQRGKSVVWLSQDFAALSSTAQKVLVKTFVEEGVNFSLTFNAVGSDDDLPYERFTESVSPKSGSGFFDVITQLKQIVILVFVFIFICGLCSVYSVATQSYIESAEGYDYMVIKNGIVQPFDDTISCVHNTYKGFGDWFKAKYGFIPTFGKSCPIVVGTVFDLENMRPIPDVPAYVSIVGRSLVFAINAAFGVTNMCYDHTGNAVSKDSYFDTCVFNTACTTLTGLGGTIVYCAKQGLVEGAKLYSDLMPDYYYEHASGNMVKLPAIIRGLGLRFVKTQATTYCRVGECIDSKAGFCFGGDNWFVYDNEFGNGYICGNSVLGFFKNVFKLFNSNMSVVATSGAMLVNIIIACLAIAMCYGVLKFKKIFGDCTFLIVMIIVTLVVNNVSYFVTQNTFFMIIYAIVYYFITRKLAYPGILDAGFIIAYINMAPWYVITAYILVFLYDSLPSLFKLKVSTNLFEGDKFVGNFESAAMGTFVIDMRSYETIVNSTSIARIKSYANSFNKYKYYTGSMGEADYRMACYAHLGKALMDYSVNRTDMLYTPPTVSVNSTLQSGLRKMAQPSGLVEPCIVRVSYGNNVLNGLWLGDEVICPRHVIASDTTRVINYENEMSSVRLHNFSVSKNNVFLGVVSARYKGVNLVLKVNQVNPNTPEHKFKSIKAGESFNILACYEGCPGSVYGVNMRSQGTIKGSFIAGTCGSVGYVLENGILYFVYMHHLELGNGSHVGSNFEGEMYGGYEDQPSMQLEGTNVMSSDNVVAFLYAALINGERWFVTNTSMSLESYNTWAKTNSFTELSSTDAFSMLAAKTGQSVEKLLDSIVRLNKGFGGRTILSYGSLCDEFTPTEVIRQMYGVNLQAGKVKSFFYPIMTAMTILFAFWLEFFMYTPFTWINPTFVSIVLAVTTLISTVFVSGIKHKMLFFMSFVLPSVILVTAHNLFWDFSYYESLQSIVENTNTMFLPVDMQGVMLTVFCFIVFVTYSVRFFTCKQSWFSLAVTTILVIFNMVKIFGTSDEPWTENQIAFCFVNMLTMIVSLTTKDWMVVIASYRIAYYIVVCVMPSAFVSDFGFMKCISIVYMACGYLFCCYYGILYWVNRFTCMTCGVYQFTVSAAELKYMTANNLSAPKNAYDAMILSAKLIGVGGKRNIKISTVQSKLTEMKCTNVVLLGLLSKMHVESNSKEWNYCVGLHNEINLCDDPEIVLEKLLALIAFFLSKHNTCDLSELIESYFENTTILQSVASAYAALPSWIALEKARADLEEAKKNDVSPQILKQLTKAFNIAKSDFEREASVQKKLDKMAEQAAASMYKEARAVDRKSKIVSAMHSLLFGMLKKLDMSSVNTIIDQARNGVLPLSIIPAASATRLVVITPSLEVFSKIRQENNVHYAGAIWTIVEVKDANGSHVHLKEVTAANELNLTWPLSITCERTTKLQNNEIMPGKLKERAVRASATLDGEAFGSGKALMASESGKSFMYAFIASDNNLKYVKWESNNDIIPIELEAPLRFYVDGANGPEVKYLYFVKNLNTLRRGAVLGYIGATVRLQAGKPTEHPSNSSLLTLCAFSPDPAKAYVDAVKRGMQPVNNCVKMLSNGAGNGMAVTNGVEANTQQDSYGGASVCIYCRCHVEHPAIDGLCRYKGKFVQIPTGTQDPIRFCIENEVCVVCGCWLNNGCMCDRTSMQSFTVDQSYLNECGVLVQLD

SEQ ID NO: 14 - protein, 4055 aa, EMCR Coronavirus; identical to SEQ ID NO: 2
  MISC_FEATURE: ORF 1A

SEQ ID NO: 15 - protein, 4416 aa, murine hepatitis virus
  MISC_FEATURE: ORF 1A
MAKMGKYGLGFKWAPEFPWMLPNASEKLGSPERSEEDGFCPSAAQEPKTKGKTLINHVRVDCSRLPALECCVQSAIIRDIFVDEDPLNVEASTMMALQFGSAVLVKPSKRLSIQAWAKLGVLPKTPAMGLFKRFCLCNTRECVCDAHVAFQLFTVQPDGVCLGNGRFIGWFVPVTAIPAYAKQWLQPWSILLRKGGNKGSVTSGHFRRAVTMPVYDFNVEDACEEVHLNPKGKYSRKAYALLKGYRGVKSILFLDQYGCDYTGRLAKGLEDYGDCTLEEMKELFPVWCDSLDNEVVVAWHVDRDPRAVMRLQTLATIRSIGYVGQPTEDLVDGDVVVREPAHLLAANAIVKRLPRLVETMLYTDSSVTEFCYKTKLCDCGFITQFGYVDCCGDACDFRGWVPGNMMDGFLCPGCSKSYMPWELEAQSSGVIPKGGVLFTQSTDTVNRESFKLYGHAVVPFGSAVYWSPYPGMWLPVIWSSVKSYADLTYTGVVGCKAIVQETDAICRSLYMDYVQHKCGNLEQRAILGLDDVYHRQLLVNRGDYSLLLENVDLFVKRRAEFACKFATCGDGLVPLLLDGLVPRSYYLIKSGQAFTSMMVNFSHEVTDMCMDMALLFMHDVKVATKYVKKVTGKLAVRFKALGVAVVRKITEWFDLAVDTAASAAGWLCYQLVNGLFAVANGGITFLSDVPELVKNFVDKFKVFFKVLIDSMSVSVLSGLTVVKTASNRVCLAGCKVYEVVQKRLSAYVMPVGCNEATCLVGEIEPAVVEDDVVDVVKAPLTYQGCCKPPTSFEKICVVDKLYMAKCGDQFYPVVVDNDTIGVLDQCWRFPCAGKKVEFNDKPKVKEIPSTRKIKINFALDATFDSVLSKACSEFEVDKDVTLDELLDVVLDAVESTLSPCKEHDVIGTKVCALLNRLAEDYVYLFDEGGEEVIAPKMYCSFSAPDDEDCVAADVVDADENQGDDADDSAALVTDTQEEDGVAKGQVGVAESDARLDQVEAFDIEKVEDPILNELSAELNAPADKTYEDVLAFDAIYSEALSAFYAVPGDETHFKVCGFYSPAIERTNCWLRSTLIVMQSLPLEFKDLEMQKLWLSYKSSYNKEFVDKLVKSVPKSIILPQGGYVADFAYFFLSQCSFKAYANWRCLKCDMDLKLQGLDAMFFYGDVVSHVCKCGTGMTLLSADIPYTLHFGLRDDKFCAFYTPRKVFRAACVVDVNDCHSMAVVDGKQIDGKVVTKFNGDKYDFMVGHGMAFSMSAFEIAQLYGSCITPNVCFVKGDVIKVLRRVGAEVIVNPANGRMAHGAGVAGAIAKAAGKSFIKETADMVKNQGVCQVGECYESTGGNLCKTVLNIVGPDARGHGKQCYSFLERAYQHINKCDDVVTTLISAGIFSVPTDVSLTYLIGVVTKNVILVSNNKDDFDVIEKCQVTSIAGTKALSLQLAKNLCRDVKFETNACDSLFSDSCFVSSYDVLQEVELLRHDIQLDDDARVFVQAHMDNLPADWRLVNKFDSVDGVRTVKYFECPGEIFVSSQGKKFGYVQNGSFKVASVSQIRALLANKVDVLCTVDGVNFRSCCVAEGEVFGKTLGSVFCDGINVTKVRCSAIHKGKVFFQYSGLSAADLVAVTDAFGFDEPQLLKYYNMLGMCKWPVVVCGNYFAFKQSNNNCYINVACLMLQHLSLKFHKWQWQEAWNEFRSGKPLRFVSLVLAKGSFKFNEPSDSTDFMRVVLREADLSGATCDFEFVCKCGVKQEQRKGVDAVMHFGTLDKGDLAKGYTIACTCGNKLVHCTQLNVPFLICSNKPEGKKLPDDVVAANIFTGGSLGHYTHVKCKPKYQLYDACNVSKVSEAKGNFTDCLYLKNLKQTFSSKLTTFYLDDVKCVEYNPDLSQYYCESGKYYTKPIIKAQFRTFEKVEGVYTNFKLVGHSIAEKFNAKLGFDCNSPFTEYKITEWPTATGDVVLASDDLYVSRYSGGCVTFGKPVIWLGHEEASLKSLTYFNRPSVVCENKFNVLPVDVSEPTDKGPVPAAVLVTGALSGAATAPGTAKEQKVCASDSVVDQVVSGFLSDLSGATVDVKEVKLNGVKKPIKVEDSVVVNDPTSETKVVKSLSIVDVYDMFLTGCRYVVWMANELSRLVNSPTVREYVKWGMTKIVIPAKLVLLRDEKQEFVAPKVVKAKVIACYSAVKWFFLYCFSWIKFNTDNKVIYTTEVASKLTFNLCCLAFKNALQTFNWNVVSRGFFLVATVFLLWFNFLYANVILSDFYLPNIGFFPTFVGQIVAWVKTTFGIFTLCDLYQVSDVGYRSSFCNGSMVCELCFSGFDMLDNYDAINVVQHVVDRRVSFDYISLFKLVVELVIGYSLYTVCFYPLFGLIGMQLLTTWLPEFFMLETMHWSARFFVFVANMLPAFTLLRFYIVVTAMYKIFCLCRHVMYGCSRPGCLFCYKRNRSVRVKCSTVVGGTLRYYDVMANGGTGFCAKHQWNCLNCSAFGPGNTFITHEAAADLSKELKRPVNPTDSAYYLVTEVKQVGCSMRLFYERDGQRVYDDVSASLFVDMNGLLHSKVKGVPETHVVVVENEADKAGFLNAAVFYAQSLYRPMLLVEKKLITTANTGLSVSQTMFDLYVDSLLGVLDVDRKSLTSFVNAAHNSLKEGVQLEQVMDTFIGCARRKCAIDSDVETKSITKSIMSAVNAGVDFTDESCNNLVPTYVKSDTIVAADLGVLIQNNAKHVQANVAKAANVACIWSVDAFNQLSADLQHRLRKACSKTGLKIKLTYNKQEANVPILTTPFSLKGGAVFSKVLQWLFVVNLICFIVLWALMPTYAVHKSDMQLPLYASFKVIDNGVLRDVTVTDACFANKFIQFDQWYESTFGLVYYRNSRACPVVVAVIDQDIGYTLFNVPTKVLRYGFHVLHFITHAFATDSVQCYTPHMQIPYDNFYASGCVLSSLCTMLAHADGTPHPYCYTEGIMHNASLYDSLAPHVRYNLANSNGYIRFPEVVSEGIVRIVRTRSMTYCRVGLCEDAEEGVCFNFNSSWVLNNPYYRAMPGTFCGRNAFDLIHQVLGGLVRPIDFFALTASSVAGAILAIIVVLAFYYLIKLKRAFGDYTSVVVINVIVWCINFLMLFVFQVYPTLSCLYACFYFYTTLYFPSEISVVMHLQWLVMYGAIMPLWFCIIYVAVVVSNHALWLFSYCRKLGTEVRSDGTFEEMSLTTFMITKESYCKLKNSVSDVAFNRYLSLYNKYRYFSGKMDTAAYREAACSQLAKAMETFNHNNGNDVLYQPPTASVTTSFLQSGIVKMVFPTSKVEPCVVSVTYGNMTLNGLWLDDKVYCPRHVICSSADMTDPDYSNLLCRVISSDFCVMSGRMSLTVMSYQMQGSLLVLTVTLQNPNTPKYSFGVVKPGETFTVLAAYNGKSQGAFHVTMRSSYTIKGSFLCGSCGSVGYVLTGDSVRFVYMHQLELSTGCHTGTDFSGNFYGPYRDAQVVQLPVQDYTQTVNVVAWLYAAILNRCNWFVQSDSCSLEEFNVWAMTNGFSSIKADLVLDALASMTGVTVEQILAAIKRLYSGFQGKQILGSCVLEDELTPSDVYQQLAGVKLQSKRTRVVKGTCCWILASTLLFCSIISAFVKWTMFMYVTTHMLGVTLCALCFVSFAMLLVKHKHLYLTMFIMPVLCTLFYTNYLVVYKQSFRGLAYAWLSHFVPAVDYTYMDEVLYGVVLLVAMVFVTMRSINHDVFSVMFLVGRLVSLVSMWYFGANLEEEVLLFLTSLFGTYTWTTMLSLATAKVIAKWLAVNVLYFTDVPQVKLVLLSYLCIGYVCCCYWGVLSLLNSIFRMPLGVYNYKISVQELRYMNANGLRPPRNSFEALVLNFKLLGIGGVPVIEVSQIQSRLTDVKCVNVVLLNCLQHLHIASSSKLWQYCSTLHNEILATSDLSVAFDKLAQLLVVLFANPAAVDSKCLASIEEVSDDYVRDSTVLQALQSEFVNMASFVEYELAKKNLDEAKASGSANQQQIKQLEKACNIAKSAYERDRAVARKLERMADLALTNMYKEARINDKKSKVVSALQTMLFSMIRKLDNQALNSILDNAVKGCVPLNAIPSLTSNTLTIIVPDKQVFDQVVDNVYVTYAGNVWHIQSIQDADGAVKQLNEIDVNITWPLVIAANRHNEVSSVVLQNNELMPQKLRTQVVNSGSDMNCNTPTQCYYNTTGMGKIVYAILSDCDGLKYTKIVKEDGNCVVLELDPPCKFSVQDVKGLKIKYLYFVKGCNTLARGWVVGTLSSTVRLQAGTATEYASNSAIRSLCAFSVDPKKTYLDYIQQGGAPVTNCVKMLCDHAGTGMAITIKPEATTNQDSYGGASVCIYCRSRVEHPDVDGLCKLRGKFVQVPLGIKDPVSYVLTHDVCQVCGFWRDGSCSCVGTGSQFQSKDTNFLNGFGVQV

SEQ ID NO: 16 - protein, 4373 aa, human coronavirus OC43
  MISC_FEATURE: ORF 1A
MSKINKYGLELHWAPEFPWMFEDAEEKLDNPSSSEVDMICSTTAQKLETDGICPENHVMVDCRRLLKQECCVQSSLIREIVMNASPYDLEVLLQDALQSREAVLVTTPLGMSLEACYVRGCNPKGWTMGLFRRRSVCNTGRCTVNKHVAYQLYMIDPAGVCLGAGQFVGWVIPLAFMPVQSRKFIVPWVMYLRKRGEKGAYNKDHGRGGFGHVYDFKVEDAYDQVHDEPKGKFSKKAYALIRGYRGVKPLLYVDQYGCDYTGSLADGLEAYADKTLQEMKALFPTWSQELLFDVIVAWHVVRDPRYVMRLQSAATIRSVAYVANPTEDLCDGSVVIKEPVHVYADDSIILRQYNLVDIMSHFYMEADTVVNAFYGVALKDCGFVMQFGYIDCEQDSCDFKGWIPGNMIDGFACTTCGHVYEVGDLIAQSSGVLPVNPVLHTKSAAGYGGFGCKDSFTLYGQTVVYFGGCVYWSPARNIWIPILKSSVKSYDSLVYTGVLGCKAIVKETNLICKALYLDYVQHKCGNLHQRELLGVSDVWHKQLLLNRGVYKPLLENIDYFNMRRAKFSLETFTVCADGFMPFLLDDLVPRAYYLAVSGQAFCDYADKLCHAVVSKSKELLDVSLDSLGAAIHYLNSKIVDLAQHFSDFGTSFVSKIVHFFKTFTTSTALAFAWVLFHVLHGAYIVVESDIYFVKNIPRYASAVAQAFQSVAKVVLDSLRVTFIDGLSCFKIGRRRICLSGRKIYEVERGLLHSSQLPLDVYDLTMPSQVQKAKQKPIYLKGSGSDFSLADSVVEVVTTSLTPCGYSEPPKVADKICIVDNVYMAKAGDKYYPVVVDDHVGLLDQAWRVPCAGRRVTFKEQPTVKEIISMPKIIKVFYELDNDFNTILNTACGVFEVDDTVDMEEFYAVVIDAIEEKLSPCKELEGVGAKVSAFLQKLEDNPLFLFDEAGEEVLAPKLYCAFTAPEDDDFLEESDVEEDDVEGEETDLTVTSAGQPCVASEQEESSEVLEDTLDDGPSVETSDSQVEEDVEMSDFVDLESVIQDYENVCFEFYTTEPEFVKVLGLYVPKATRNNCWLRSVLAVMQKLPCQFKDKNLQDLWVLYKQQYSQLFVDTLVNKIPANIVLPQGGYVADFAYWFLTLCDWQCVAYWKCIKCDLALKLKGLDAMFFYGDVVSHICKCGESMVLIDVDVPFTAHFALKDKLFCAFITKRIVYKAACVVDVNDSHSMAVVDGKQIDDHRITSITSDKFDFIIGHGMSFSMTTFEIAQLYGSCITPNVCFVKGDIIKVSKLVKAEVVVNPANGHMAHGGGVAKAIAVAAGQQFVKETTDMVKSKGVCATGDCYVSTGGKLCKTVLNVVGPDARTQGKQSYVLLERVYKHLNNYDCVVTTLISAGIFSVPSDVSLTYLLGTAKKQVVLVSNNQEDFDLISKCQITAVEGTKKLAARLSFNVGRSIVYETDANKLILINDVAFVSTFNVLQDVLSLRHDIALDDDARTFVQSNVDVVPEGWRVVNKFYQINGVRTVKYFECTGGIDICSQDKVFGYVQQGIFNKATVAQIKALFLDKVDILLTVDGVNFTNRFVPVGESFGKSLGNVFCDGVNVTKHKCDINYKGKVFFQFDNLSSEDLKAVRSSFNFDQKELLAYYNMLVNCFKWQVVVNGKYFTFKQANNNCFVNVSCLMLQSLHLTFKIVQWQEAWLEFRSGRPARFVALVLAKGGFKFGDPADSRDFLRVVFSQVDLTGAICDFEIACKCGVKQEQRTGLDAVMHFGTLSREDLEIGYTVDCSCGKKLIHCVRFDVPFLICSNTPASVKLPKGVGSANIFIGDKVGHYVHVKCEQSYQLYDASNVKKVTDVTGKLSDCLYLKNLKQTFKSVLTTYYLDDVKKIEYKPDLSQYYCDGGKYYTQRIIKAQFKTFEKVDGVYTNFKLIGHTVCDSLNAKLGFDSSKEFVEYKITEWPTATGDVVLATDDLYVKRYERGCITFGKPVIWLSHEKASLNSLTYFNRPSLVDDNKFDVLKVDDVDDGGDSSESGAKETKEINIIKLSGVKKPFKVEDSVIVNDDTSETKYVKSLSIVDVYDMWLTGCKYVVRTANALSRAVNVPTIRKFIKFGMTLVSIPIDLLNLREIKPAVNVVKAVRNKISVCFNFIKWLFVLLFGWIKISADNKVIYTTEIASKLTCKLVALAFKNAFLTFKWSMVARGACIIATIFLLWFNFIYANVIFSDFYLPKIGFLPTFVGKIAQWIKNTFSLVTICDLYSMQDVGFKNQYCNGSIACQFCLAGFDMLDNYKAIDVVQYEADRRAFVDYTGVLKIVIELIVSYALYTAWFYPLFALISIQILTTWLPELFMLSTLHWSFRLLVALANMLPAHVFMRFYIIIASFIKLFSLFRHVAYGCSKSGCLFCYKRNRSLRVKCSTIVGGMIRYYDVMANGGTGFCSKHQWNCIDCDSYKPGNTFITVEAALDLSKELKRPIQPTDVAYHTVTDVKQVGCSMRLFYDRDGQRTYDDVNASLFVDYSNLLHSKVKSVPNMHVVVVENDADKANFLNAAVFYAQSLFRPILMVDKNLITTANTGTSVTETMFDVYVDTFLSMFDVDKKSLNALIATAHSSIKQGTQIYKVLDTFLSCARKSCSIDSDVDTKCLADSVMSAVSAGLELTDESCNNLVPTYLKSDNIVAADLGVLIQNSAKHVQGNVAKIAGVSCIWSVDAFNQFSSDFQHKLKKACCKTGLKLKLTYNKQMANVSVLTTPFSLKGGAVFSYFVYVCFVLSLVCFIGLWCLMPTYTVHKSDFQLPVYASYKVLDNGVIRDVSVEDVCFANKFEQFDQWYESTFGLSYYSNSMACPIVVAVIDQDFGSTVFNVPTKVLRYGYHVLHFITHALSADGVQCYTPHSQISYSNFYASGCVLSSACTMFTMADGSPQPYCYTEGLMQNASLYSSLVPHVRYNLANAKGFIRFPEVLREGLVRIVRTRSMSYCRVGLCEEADEGICFNFNGSWVLNNDYYRSLPGTFCGRDVFDLIYQLFKGLAQPVDFLALTASSIAGAILAVIVVLVFYYLIKLKRAFGDYTSVVFVNVIVWCVNFMMLFVFQVYPILSCVYAICYFYATLYFPSEISVIMHLQWLVMYGTIMPLWFCLLYIAVVVSNHAFWVFSYCRKLGTSVRSDGTFEEMALTTFMITKDSYCKLKNSLSDVAFNRYLSLYNKYRYYSGKMDTAAYREAACSQLAKAMDTFTNNNGSDVLYQPPTASVSTSFLQSGIVKMVNPTSKVEPCVVSVTYGNMTLNGLWLDDKVYCPRHVICSASDMTNPDYTNLLCRVTSSDFTVLFDRLSLTVMSYQMRGCMLVLTVTLQNSRTPKYTFGVVKPGETFTVLAAYNGKPQGAFHVTMRSSYTIKGSFLCGSCGSVGYVIMGDCVKFVYMHQLELSTGCHTGTDFNGDFYGPYKDAQVVQLLIQDYIQSVNFVAWLYAAILNNCNWFVQSDKCSVEDFNVWALSNGFSQVKSDLVIDALASMTGVSLETLLAAIKRLKNGFQGRQIMGSCSFEDELTPSDVYQQLAGIKLQSKRTRLFKGTVCWIMASTFLFSCIITAFVKWTMFMYVTTNMFSITFCALCVISLAMLLVKHKHLYLTMYITPVLFTLLYNNYLVVYKHTFRGYVYAWLSYYVPSVEYTYTDEVIYGMLLLVGMVFVTLRSINHDLFSFIMFVGRLISVFSLWYKGSNLEEEILLMLASLFGTYTWTTVLSMAVAKVIAKWVAVNVLYFTDIPQIKIVLLCYLFIGYIISCYWGLFSLMNSLFRMPLGVYNYKISVQELRYMNANGLRPPKNSFEALMLNFKLLGIGGVPIIEVSQFQSKLTDVKCANVVLLNCLQHLHVASNSKLWHYCSTLHNEILATSDLSVAFEKLAQLLIVLFANPAAVDSKCLTSIEEVCDDYAKDNTVLQALQSEFVNMASFVEYEVAKKNLDEARFSGSANQQQLKQLEKACNIAKSAYERDRAVAKKLERMADLALTNMYKEARINDKKSKVVSALQTMLFSMVRKLDNQALNSILDNAVKGCVPLNAIPSLAANTLNIIVPDKSVYDQVVDNVYVTYAGNVWQIQTIQDSDGTNKQLNEISDDCNWPLVIIANRYNEVSATVLQNNELMPAKLKIQVVNSGPDQTCNTPTQCYYNNSNNGKIVYAILSDVDGLKYTKILKDDGNFVVLELDPPCKFTVQDAKGLKIKYLYFVKGCNTLARGWVVGTISSTVRLQAGTATEYASNSSILSLCAFSVDPKKTYLDFIQQGGTPIANCVKMLCDHAGTGMAITVKPDATTSQDSYGGASVCIYCRARVEHPDVDGLCKLRGKFVQVPVGIKDPVSYVLTHDVCRVCGFWRDGSCSCVSTDTTVQSKDT

SEQ ID NO: 17 - protein, 4102 aa, porcine epidemic diarrhea virus
  MISC_FEATURE: ORF 1A
MASNHVTLAFANDAEISAFGFCTASEAVSYYSEAAASGFMQCRFVSLDLADTVEGLLPEDYVMVVIGTTKLSAYVDTFGSRPRNICGWLLFSNCNYFLEELELTFGRRGGNIVPVDQYMCGADGKPVLQESEWEYTDFFADSEDGQLNIAGITYVKAWIVERSDVSYASQNLTSIKSITYCSTYEHTFLDGTAMKVARTPKIKKNVVLSEPLATIYREIGSPFVDNGSDARSIIRRPVFLHAFVKCKCGSYHWTVGDWTSYVSTCCGFKCKPVLVASCSAMPGSVVVTRAGAGTGVKYYNNMFLRHVADIDGLAFWRILKVQSKDDLACSGKFLEHHEEGFTDPCYFLNDSSLATKLKFDILSGKFSDEVKQAIIAGHVVVGSALVDIVDDALGQPWFIRKLGDLASAPWEQLKAVVRGLGLLSDEVVLFGKRLSCATLSIVNGVFEFLADVPEKLAAAVTVFVNFLNEFFESACDCLKVGGKTFNKVGSYVLFDNALVKLVKAKARGPRQAGICEVRYTSLVVGSTTKVVSKRVENANVNLVVVDEDVTLNTTGRTVVVDGLAFFESDGFYRHLADADVVIEHPVYKSACELKPVFECDPIPDFPLPVAASVAELCVQTDLLLKNYNTPYKTYSCVVRGDKCCITCTLQFKAPSYVEDAVNFVDLCTKNIGTAGFHEFYITAHEQQDLQGFLTTCCTMSGFECFMPTIPQCPAVLEEIDGGSIWRSFITGLNTMWDFCKRLKVSFGLDGIVVTVARKFKRLGALLAEMYNTYLSTVVENLVLAGVSFKYYATSVPKIVLGGCFHSVKSVFASVFQIPVQAGIEKFKVFLNCVHPVVPRVIETSFVELEETTFKPPALNGGIAIVDGFAFYYDGTLYYPTDGNSVVPICFKKKGGGDVKFSDEVSVKTIDPVYKVSLEFEFESETIMAVLNKAVGNRIKVTGGWDDVVEYINVAIEVLKDHVEVPKYYIYDEEGGTDPNLPVMVSQWPLNDDTISQDLLDVEVVTDAPIDSEGDEVDSSAPEKVADVANSEPGDDGLPVAPETNVESEVEEVAATLSFIKDTPSTVTKDPFAFDFVSYGGLKVLRQSHNNCWVTSTLVQLQLLGIVDDPAMELFSAGRVGPMVRKCYESQKAILGSLGDVSACLESLTKDLHTLKITCSVVCGCGTGERIYEGCAFRMTPTLEPFPYGACAQCAQVLMHTFKSIVGTGIFCRDTTALSLDSLVVKPLCAAAFIGKDSGHYVTNFYDAAMAIDGYGRHQIKYDTLNTICVKDVNWTAPLVPAVDSVVEPVVKPFYSYKNVDFYQGDFSDLVKLPCDFVVNAANEKLSHGGGIAKAIDVYTKGMLQKCSNDYIKAHGPIKVGRGVMLEALGLKVFNVVGPRKGKHAPELLVKAYKSVFANSGVALTPLISVGIFSVPLEESLSAFLACVGDRHCKCFCYGDKEREAIIKYMDGLVDAIFKEALVDTTPVQEDVQQVSQKPVLPNFEPFRIEGAHAFYECNPEGLMSLGADKLVLFTNSNLDFCSVGKCLNDVTSGALLEAINVFKKSNKTVPAGNCVTLDCANMISITMVVLPFDGDANYDKNYARAVVKVSKLKGKLVLAVDDATLYSKLSHLSVLGFVSTPDDVERFYANKSVVIKVTEDTRSVKAVKVESTATYGQQIGPCLVNDTVVTDNKPVVADVVAKVVPNANWDSHYGFDKAGEFHMLDHTGFTFPSEVVNGRRVIKTTDNNCWVNVTCLQLQFARFRFKSAGLQAMWESYCTGDVAMFVHWLYWLTGVDKGQPSDSENALNMLSKYIVPAGSVTIERVTHDGCCCSKRVVTAPVVNASVLKLGVEDGLCPHGLNYIGKVVVVKGTTIVVNVGKPVVAPSHLFLKGVSYTTFLDNGNGVVGHYTVFDHGTGMVHDGDAFVPGDLNVSPVTNVVVSEQTAVVIKDPVKKAELDATKLLDTMNYASERFFSFGDFMSRNLITVFLYILSILGLCFRAFRKRDVKVLAGVPQRTGIILRKSMRYNAKALGVFFKLKLYWFKVLGKFSLGIYALYALLFMTIRFTPIGSPVCDDVVAGYANSSFDKNEYCNSVICKVCLYGYQELSDFSHTQVVWQHLRDPLIGNVMPFFYLAFLAIFGGVYVKAITLYFIFQYLNSLGVFLGLQQSIWFLQLVPFDVFGDEIVVFFIVTRVLMFIKHVCLGCDKASCVACSKSARLKRVPVQTIFQGTSKSFYVHANGGSKFCKKHNFFCLNCDSYGPGCTFINDVIATEVGNVVKLNVQPTGPATILIDKVEFSNGFYYLYSGDTFWKYNFDITDSKYTCKEALKNCSIITDFIVFNNNGSNVNQVKNACVYFSQMLCKPVKLVDSALLASLSVDFGASLHSAFVSVLSNSFGKDLSSCNDMQDCKSTLGFDDVPLDTFNAAVAEAHRYDVLLTDMSFNNFTTSYAKPEEKFPVHDIATCMRVGAKIVNHNVLVKDSIPVVWLVRDFIALSEETRKYIIRTTKVKGITFMLTFNDCRMHTTIPTVCIANKKGAGLPSFSKVKKFFWFLCLFIVAAFFALSFLDFSTQVSSDSDYDFKYIESGQLKTFDNPLSCVHNVFINFDQWHDAKFGFTPVNNPSCPIVVGVSDEARTVPGIPAGVYLAGKTLVFAINTIFGTSGLCFDASGVADKGACIFNSACTTLSGLGGTAVYCYKNGLVEGAKLYSELAPHSYYKMVDGNAVSLPEIISRGFGIRTIRTKAMTYCRVGQCVQSAEGVCFGADRFFVYNAESGSDFVCGTGLFTLLMNVISVFSKTVPVTVLSGQILFNCIIAFVAVAVCFLFTKFKRMFGDMSVGVFTVGACTLLNNVSYIVTQNTLGMLGYATLYFLCTKGVRYMWIWHLGFLISYILIAPWWVLMVYAFSAIFEFMPNLFKLKVSTQLFEGDKFVGSFENAAAGTFVLDMHAYERLANSISTEKLRQYASTYNKYKYYSGSASEADYRLACFAHLAKAMMDYASNHNDTLYTPPTVSYNSTLQAGLRKMAQPSGVVEKCIVRVCYGNMALNGLWLGDIVMCPRHVIASSTTSTIDYDYALSVLRLHNFSISSGNVFLGVVSATMRGALLQIKVNQNNVHTPKYTYRTVRPGESFNILACYDGAAAGVYGVNMRSNYTIRGSFINGACGSPGYNINNGTVEFCYLHQLELGSGCHVGSDLDGVMYGGYEDQPTLQVEGASSLFTENVLAFLYAALINGSTWWLSSSRIAVDRFNEWAVHNGMTTVGNTDCFSILAAKTGVDVQRLLASIQSLHKNFGGKQILGHTSLTDEFTTGEVVRQMYGVNLQGGYVSRACRNVLLVGSFLTFFWSELVSYTKFFWVNPGYVTPMFACLSLLSSLLMFTLKHKTLFFQVFLIPALIVTSCINLAFDVEVYNYLAEHFDYHVSLMGFNAQGLVNIFVCFVVTILHGTYTWRFFNTPASSVTYVVALLTAAYNYFYASDILSCAMTLFASVTGNWFVGAVCYKVAVYMALRFPTFVAIFGDIKSVMFCYLVLGYFTCCFYGILYWFNRFFKVSVGVYDYTVSAAEFKYMVANGLRAPTGTLDSLLLSAKLIGIGGERNIKISSVQSKLTDIKCSNVVLLGCLSSMNVSANSTEWAYCVDLHNKINLCNDPEKAQEMLLALLAFFLSKNSAFGLDDLLESYFNDNSMLQSVASTYVGLPSYVIYENARQQYEDAVNNGSPPQLVKQLRHAMNVAKSEFDREASTQRKLDRMAEQAAAQMYKEARAVNRKSKVVSAMHSLLFGMLRRLDMSSVDTILNLAKDGVVPLSVIPAVSATKLNIVTSDIDSYNRIQREGCVHYAGTIWNIIDIKDNDGKVVHVKEVTAQNAESLSWPLVLGCERIVKLQNNEIIPGKLKQRSIKAEGDGIVGEGKALYNNEGGRTFMYAFISDKPDLRVVKWEFDGGCNTIELEPPRKFLVDSPNGAQIKYLYFVRNLNTLRRGAVLGYIGATVRLQAGKQTEQAINSSLLTLCAFAVDPAKTYIDAVKSGHKPVGNCVKMLANGSGNGQAVTNGVEASTNQDSYGGASVCLYCRAHVEHPSMDGFCRLKGKYVQVPLGTVDPIRFVLENDVCKVCGCWLSNGCTCDRSIMQST

SEQ ID NO: 18 - protein, 4382 aa, human SARS virus
  MISC_FEATURE: ORF 1A
MESLVLGVNEKTHVQLSLPVLQVRDVLVRGFGDSVEEALSEAREHLKNGTCGLVELEKGVLPQLEQPYVFIKRSDALSTNHGHKVVELVAEMDGIQYGRSGITLGVLVPHVGETPIAYRNVLLRKNGNKGAGGHSYGIDLKSYDLGDELGTDPIEDYEQNWNTKHGSGALRELTRELNGGAVTRYVDNNFCGPDGYPLDCIKDFLARAGKSMCTLSEQLDYIESKRGVYCCRDHEHEIAWFTERSDKSYEHQTPFEIKSAKKFDTFKGECPKFVFPLNSKVKVIQPRVEKKKTEGFMGRIRSVYPVASPQECNNMHLSTLMKCNHCDEVSWQTCDFLKATCEHCGTENLVIEGPTTCGYLPTNAVVKMPCPACQDPEIGPEHSVADYHNHSNIETRLRKGGRTRCFGGCVFAYVGCYNKRAYWVPRASADIGSGHTGITGDNVETLNEDLLEILSRERVNINIVGDFHLNEEVAIILASFSASTSAFIDTIKSLDYKSFKTIVESCGNYKVTKGKPVKGAWNIGQQRSVLTPLCGFPSQAAGVIRSIFARTLDAANHSIPDLQRAAVTILDGISEQSLRLVDAMVYTSDLLTNSVIIMAYVTGGLVQQTSQWLSNLLGTTVEKLRPIFEWIEAKLSAGVEFLKDAWEILKFLITGVFDIVKGQIQVASDNIKDCVKCFIDVVNKALEMCIDQVTIAGAKLRSLNLGEVFIAQSKGLYRQCIRGKEQLQLLMPLKAPKEVTFLEGDSHDTVLTSEEVVLKNGELEALETPVDSFTNGAIVGTPVCVNGLMLLEIKDKEQYCALSPGLLATNNVFRLKGGAPIKGVTFGEDTVWEVQGYKNVRITFELDERVDKVLNEKCSVYTVESGTEVTEFACVVAEAVVKTLQPVSDLLTNMGIDLDEWSVATFYLFDDAGEENFSSRMYCSFYPPDEEEEDDAECEEEEIDETCEHEYGTEDDYQGLPLEFGASAETVRVEEEEEEDWLDDTTEQSEIEPEPEPTPEEPVNQFTGYLKLTDNVAIKCVDIVKEAQSANPMVIVNAANIHLKHGGGVAGALNKATNGAMQKESDDYIKLNGPLTVGGSCLLSGHNLAKKCLHVVGPNLNAGEDIQLLKAAYENFNSQDILLAPLLSAGIFGAKPLQSLQVCVQTVRTQVYIAVNDKALYEQVVMDYLDNLKPRVEAPKQEEPPNTEDSKTEEKSVVQKPVDVKPKIKACIDEVTTTLEETKFLTNKLLLFADINGKLYHDSQNMLRGEDMSFLEKDAPYMVGDVITSGDITCVVIPSKKAGGTTEMLSRALKKVPVDEYITTYPGQGCAGYTLEEAKTALKKCKSAFYVLPSEAPNAKEEILGTVSWNLREMLAHAEETRKLMPICMDVRAIMATIQRKYKGIKIQEGIVDYGVRFFFYTSKEPVASIITKLNSLNEPLVTMPIGYVTHGFNLEEAARCMRSLKAPAVVSVSSPDAVTTYNGYLTSSSKTSEEHFVETVSLAGSYRDWSYSGQRTELGVEFLKRGDKIVYHTLESPVEFHLDGEVLSLDKLKSLLSLREVKTIKVFTTVDNTNLHTQLVDMSMTYGQQFGPTYLDGADVTKIKPHVNHEGKTFFVLPSDDTLRSEAFEYYHTLDESFLGRYMSALNHTKKWKFPQVGGLTSIKWADNNCYLSSVLLALQQLEVKFNAPALQEAYYRARAGDAANFCALILAYSNKTVGELGDVRETMTHLLQHANLESAKRVLNVVCKHCGQKTTTLTGVEAVMYMGTLSYDNLKTGVSIPCVCGRDATQYLVQQESSFVMMSAPPAEYKLQQGTFLCANEYTGNYQCGHYTHITAKETLYRIDGAHLTKMSEYKGPVTDVFYKETSYTTTIKPVSYKLDGVTYTEIEPKLDGYYKKDNAYYTEQPIDLVPTQPLPNASFDNFKLTCSNTKFADDLNQMTGFTKPASRELSVTFFPDLNGDVVAIDYRHYSASFKKGAKLLHKPIVWHINQATTKTTFKPNTWCLRCLWSTKPVDTSNSFEVLAVEDTQGMDNLACESQQPTSEEVVENPTIQKEVIECDVKTTEVVGNVILKPSDEGVKVTQELGHEDLMAAYVENTSITIKKPNELSLALGLKTIATHGIAAINSVPWSKILAYVKPFLGQAAITTSNCAKRLAQRVFNNYMPYVFTLLFQLCTFTKSTNSRIRASLPTTIAKNSVKSVAKLCLDAGINYVKSPKFSKLFTIAMWLLLLSICLGSLICVTAAFGVLLSNFGAPSYCNGVRELYLNSSNVTTMDFCEGSFPCSICLSGLDSLDSYPALETIQVTISSYKLDLTILGLAAEWVLAYMLFTKFFYLLGLSAIMQVFFGYFASHFISNSWLMWFIISIVQMAPVSAMVRMYIFFASFYYIWKSYVHIMDGCTSSTCMMCYKRNRATRVECTTIVNGMKRSFYVYANGGRGFCKTHNWNCLNCDTFCTGSTFISDEVARDLSLQFKRPINPTDQSSYIVDSVAVKNGALHLYFDKAGQKTYERHPLSHFVNLDNLRANNTKGSLPINVIVFDGKSKCDESASKSASVYYSQLMCQPILLLDQVLVSDVGDSTEVSVKMFDAYVDTFSATFSVPMEKLKALVATAHSELAKGVALDGVLSTFVSAARQGVVDTDVDTKDVIECLKLSHHSDLEVTGDSCNNFMLTYNKVENMTPRDLGACIDCNARHINAQVAKSHNVSLIWNVKDYMSLSEQLRKQIRSAAKKNNIPFRLTCATTRQVVNVITTKISLKGGKIVSTCFKLMLKATLLCVLAALVCYIVMPVHTLSIHDGYTNEIIGYKAIQDGVTRDIISTDDCFANKHAGFDAWFSQRGGSYKNDKSCPVVAAIITREIGFIVPGLPGTVLRAINGDFLHFLPRVFSAVGNICYTPSKLIEYSDFATSACVLAAECTIFKDAMGKPVPYCYDTNLLEGSISYSELRPDTRYVLMDGSIIQFPNTYLEGSVRVVTTFDAEYCRHGTCERSEVGICLSTSGRWVLNNEHYRALSGVFCGVDAMNLIANIFTPLVQPVGALDVSASVVAGGIIAILVTCAAYYFMKFRRVFGEYNHVVAANALLFLMSFTILCLVPAYSFLPGVYSVFYLYLTFYFTNDVSFLAHLQWFAMFSPIVPFWITAIYVFCISLKHCHWFFNNYLRKRVMFNGVTFSTFEEAALCTFLLNKEMYLKLRSETLLPLTQYNRYLALYNKYKYFSGALDTTSYREAACCHLAKALNDFSNSGADVLYQPPQTSITSAVLQSGFRKMAFPSGKVEGCMVQVTCGTTTLNGLWLDDTVYCPRHVICTAEDMLNPNYEDLLIRKSNHSFLVQAGNVQLRVIGHSMQNCLLRLKVDTSNPKTPKYKFVRIQPGQTFSVLACYNGSPSGVYQCAMRPNHTIKGSFLNGSCGSVGFNIDYDCVSFCYMHHMELPTGVHAGTDLEGKFYGPFVDRQTAQAAGTDTTITLNVLAWLYAAVINGDRWFLNRFTTTLNDFNLVAMKYNYEPLTQDHVDILGPLSAQTGIAVLDMCAALKELLQNGMNGRTILGSTILEDEFTPFDVVRQCSGVTFQGKFKKIVKGTHHWMLLTFLTSLLILVQSTQWSLFFFVYENAFLPFTLGIMAIAACAMLLVKHKHAFLCLFLLPSLATVAYFNMVYMPASWVMRIMTWLELADTSLSGYRLKDCVMYASALVLLILMTARTVYDDAARRVWTLMNVITLVYKVYYGNALDQAISMWALVISVTSNYSGVVTTIMFLARAIVFVCVEYYPLLFITGNTLQCIMLVYCFLGYCCCCYFGLFCLLNRYFRLTLGVYDYLVSTQEFRYMNSQGLLPPKSSIDAFKLNIKLLGIGGKPCIKVATVQSKMSDVKCTSVVLLSVLQQLRVESSSKLWAQCVQLHNDILLAKDTTEAFEKMVSLLSVLLSMQGAVDINRLCEEMLDNRATLQAIASEFSSLPSYAAYATAQEAYEQAVANGDSEVVLKKLKKSLNVAKSEFDRDAAMQRKLEKMADQAMTQMYKQARSEDKRAKVTSAMQTMLFTMLRKLDNDALNNIINNARDGCVPLNIIPLTTAAKLMVVVPDYGTYKNTCDGNTFTYASALWEIQQVVDADSKIVQLSEINMDNSPNLAWPLIVTALRANSAVKLQNNELSPVALRQMSCAAGTTQTACTDDNALAYYNNSKGGRFVLALLSDHQDLKWARFPKSDGTGTIYTELEPPCRFVTDTPKGPKVKYLYFIKGLNNLNRGMVLGSLAATVRLQAGNATEVPANSTVLSFCAFAVDPAKAYKDYLASGGQPITNCVKMLCTHTGTGQAITVTPEANMDQESFGGASCCLYCRCHIDHPNPKGFCDLKGKYVQIPTTCANDPVGFTLRNTVCTVCGMWKGYGCSCDQLREPLMQSADASTFLNGFAV

SEQ ID NO: 19 - protein, 4383 aa, Bovine coronavirus
  MISC_FEATURE: ORF 1A
MSKINKYGLELHWAPEFPWMFEDAEEKLDNPSSSEVDIVCSTTAQKLETGGICPENHVMVDCRRLLKQECCVQSSLIREIVMNTRPYDLEVLLQDALQSREAVLVTPPLGMSLEACYVRGCNPNGWTMGLFRRRSVCNTGRCAVNKHVAYQLYMIDPAGVCFGAGQFVGWVIPLAFMPVQSRKFIAPWVMYLRKCGEKGAYIKDYKRGGFEHVYNFKVEDAYDLVHDEPKGKFSKKAYALIRGYRGVKPLLYVDQYGCDYTGGLADGLEAYADKTLQEMKALFPIWSQELPFDVTVAWHVVRDPRYVMRLQSASTIRSVAYVANPTEDLCDGSVVIKEPVHVYADDSIILRQHNLVDIMSCFYMEADAVVNAFYGVDLKDCGFVMQFGYIDCEQDLCDFKGWVPGNMIDGFACTTCGHVYETGDLLAQSSGVLPVNPVLHTKSAAGYGGFGCKDSFTLYGQTVVYFGGCVYWSPARNIWIPILKSSVKSYDGLVYTGVVGCKAIVKETNLICKALYLDYVQHKCGNLHQRELLGVSDVWHKQLLLNRGVYKPLLENIDYFNMRRAKFSLETFTVCADGFMPFLLDDLVPRAYYLAVSGQAFCDYAGKICHAVVSKSKELLDVSVDSLGAAIHYLNSKIVDLAQHFSDFGTSFVSKIVHFFKTFTTSTALAFAWVLFHVLHGAYIVVESDIYFGKNIPRYASAVAQAFRSGAKVGLDSLRVTFIDGLSCFKIGRRRICLSGSKIYEVERGLLHSSQLPLDVYDLTMPSQVQKTKQKGIYLKGSGSDFSLADSVVEVVTTSLTPCGYSEPPKVADKICIVDNVYMAKAGDKYYPVVVDGHVGLLDQAWRVPCAGRCVTFKEQPTVNEIASTPKTIKVFYELDKDFNTILNTACGEFEVDDTVDMEEFYAVVIDAIEEKLSPCKELEGVGAKVSAFLQKLEDNSLFLFDEAGEEVLAPKLYCAFTAPEDDDFLEESGVEEDDVEGEETDLTVTSAGEPCVASEQEESSEILEDTLDDGPCVETSDSQVEEDVQMSDFGDLESVIQDYENVCFEFYTTEPEFVKVLDLYVPKATRNNCWLRSVLAVMQKLPCQFKDKNLQDLWVLYKQQYSQLFVDTLVNKIPANIVVPQGGYVADFAYWFLTLCDWQCVAYWKCIKCDLALKLKGLDAMFFYGDVVSHVCKCGESMVLIDVDVPFTAHFALKDKLFCAFITKRSVYKAACVVDVNDSHSMAVVDGKQIDDHRITSITSDKFDFIIGHGTSFSMTTFEIAQLYGSCITPNVCFVKGDIIKVSKRVKAEVVVNPANGHMAHGGGVAKAIAVAAGQQFVKETTDMVKSKGVCATGDCYVSTGGKLCKTVLNVVGPDARTQGKQSYALLERVYKHLNKYDCVVTTLISAGIFSVPSDVSLTYLLGTAKKQVVLVSNNQEDFDLISKCQITAVEGTKKLAERLSFNVGRSIVYETDANKLILSNDVAFVSTFNVLQDVLSLRHDIALDDDARTFVQSNVDVVPEGWRVVNKFYQINGVRPVKYFECPGGIDICSQDKVFGYVQQGSFNKATVAQIKALFLDKVDILLTVDGVNFTNRFVPVGESFGKSLGNVFCDGVNVTKHKCDINYKGKVFFQFDNLSSEDLKAVRSSFNFDQKELLAYYNMLVNCSKWQVVFNGKYFTFKQANNNCFVNVSCLMLQSLNLKFKIVQWQEAWLEFRSGRPARFVSLVLAKGGFKFGDPADSRDFLRVVFSQVDLTGAICDFEIACKCGVKQEQRTGVDAVMHFGTLSREDLEIGYTVDCSCGKKLIHCVRFDVPFLICSNTPASVKLPKGVGSANIFKGDKVGHYVHVKCEQSYQLYDASNVKKVTDVTGNLSDCLYLKNLKQTFKSVLTTYYLDDVKKIEYKPDLSQYYCDGGKYYTQRIIKAQFKTFEKVDGVYTNFKLIGHTVCDILNAKLGFDSSKEFVEYKVTEWPTATGDVVLATDDLYVKRYERGCITFGKPVIWLSHEQASLNSLTYFNRPLLVDENKFDVLKVDDVDDGGDISESDAKEPKEINIIKLSGVKKPFKVEDSVIVNDDTSEIKYVKSLSIVDVYDMWLTGCRCVVRTANALSRAVNVPTIRKFIKFGMTLVSIPIDLLNLREIKPVFNVVKAVRNKISACFNFIKWLFVLLFGWIKISADNKVIYTTEVASKLTCKLVALAFKNAFLTFKWSVVARGACIIATIFLLWFNFIYANVIFSDFYLPKIGFLPTFVGKIVQWIKNTFSLVTICDLYSIQDVGFKNQYCNGSIACQFCLAGFDMLDNYKAIDVVQYEADRRAFVDYTGVLKIVIELIVSYALYTAWFYPLFALISIQILTTWLPELLMLSTLHWSVRLLVSLANMLPAHVFMRFYIIIASFIKLFSLFRHVAYGCSKSGCLFCYKRNRSLRVKCSTIVGGMIRYYDVMANGGTGFCSKHQWNCIDCDSYKPGNTFITVEAALDLSKELKRPIQPTDVAYHTVTDVKQVGCYMRLFYDRDGQRTYDDVNASLFVDYSNLLHSKVKSVPNMHVVVVENDADKANFLNAAVFYAQSLFRPILMVDKILITTANTGTSVTETMFDVYVDTFLSMFDVDKKSLNALIATAHSSIKQGTQICKVLDTFLSCARKSCSIDSDVDTKCLADSVMSAVSAGLELTDESCNNLVPTYLKGDNIVAADLGVLIQNSAKHVQGNVAKIAGVSCIWSVDAFNQLSSDFQHKLKKACCKTGLKLELTYNKQMANVSVLTTPFSLKGGAVFSYFVYVCFVLSLVCFIGLWCLMPTYTVHKSDFQLPVYASYKVLDNGVIRDVSVEDVCFANKFEQFDQWYESTFGLSYYSNSMACPIVVAVVDQDFGSTVFNVPTKVLRYGYHVLHFITHALSADGVQCYTPHSQISYSNFYASGCVLSSACTMFAMADGSPQPYCYTDGLMQNASLYSSLVPHVRYNLANAKGFIRLPEVLREGLVRIVRTRSMSYCRVGLCEEADEGICFNFNGSWVLNNDYYRSLPGTFCGRDVFDLIYQLFKGLAQPVDFLALTASSIAGAILAVIVVLGFYYLIKLKRAFGDYTSIVFVNVIVWCVNFMMLFVFQVYPTLSCVYAICYFYATLYFPSEISVIMHLQWLVMYGTIMPLWFCLLYISVVVSNHAFWVFSYCRQLGTSVRSDGTFEEMALTTFMITKDSYCKLKNSLSDVAFNRYLSLYNKYRYYSGKMDTAAYREAACSQLAKAMDTFTNNNGSDVLYQPPTASVSTSFLQSGIVKMVNPTSKVEPCIVSVTYGNMTLNGLWLDDKVYCPRHVICSASDMTNPDYTNLLCRVTSSDFTVLFDRLSLTVMSYQMQGCMLVLTVTLQNSRTPKYTFGVVKPGETFTVLAAYNGKPQGAFHVTMRSSYTIKGSFLCGSCGSVGYVIMGDCVKFVYMHQLELSTGCHTGTDFNGDFYGPYKDAQVVQLPVQDYIQSVNFVAWLYAAILNNCNWFVQSDKCSVEDFNVWALSNGFSQVKSDLVIDALASMTGVSLETLLAAIKRLKNGFQGRQIMGSCSFEDELTPSDVYQQLAGIKLQSKRTRLVKGIVCWIMASTFLFSCIITAFVKWTMFMYVTTNMLSITFCALCVISLAMLLVKHKHLYLTMYIIPVLFTLLYNNYLVVYKQTFRGYVYAWLSYYVPSVEYTYTDEVIYGMLLLIGMVFVTLRSINHDLFSFIMFVGRVISVVSLWYMGSNLEEEILLMLASLFGTYTWTTALSMAAAKVIAKWVAVNVLYFTDIPQIKIVLVCYLFIGYIISCYWGLFSLMNSLFRMPLGVYNYKISVQELRYMNANGLRPPKNSFEALMLNFKLLGIGGVPIIEVSQFQSKLTDVKCANGGLLNCLQHLHVASNSKLWQYCSTLHNEILATSDLGVAFEKLAQLLIVLFANPAAVDSKCLTSIEEVCDDYAKDNTVLQALQSEFVNMASFVEYEVAKKNLDEACSSGSANQQQLKQLEKACNIAKSAYERDRAVARKLERMADLALTNMYKEARINDKKSKVVSALQTMLFSMVRKLDNQALNSILDNAVKGCVPLNAIPSLAANTLTIIVPDKSVYDQVVDNVYVTYAGNVWQIQTIQDSDGTNKQLHEISDDCNWPLVIIANRHNEVSATVLQNNELMPAKLKTQVVNSGPDQTCNTPTQCYYNNSYNGKIVYAILSDVDGLKYTKILKDDGNFVVLELDPPCKFTVQDVKGLKIKYLYFVKGCNTLARGWVVGTISSTVRLQAGTATEYASNSSILSLCAFSVDPKKTYLDFIQQGGTPIANCVKMLCDHAGTGMAITVKPDATTSQDSYGGASVCIYCRARVEHPDVDGLCKLRGKFVQVPVGIKDPVSYVLTHDVCQVCGFWRDGSCSCVSTDTTVQSKDTNFLNGFGVRV

SEQ ID NO: 20 - protein, 6685 aa, transmissable gastroenteritus virus
  MISC_FEATURE: ORF 1AB
MSSKQFKILVNEDYQVNVPSLPIRDVLQEIKYCYRNGFEGYVFVPEYCRDLVDCDRKDHYVIGVLGNGVSDLKPVLLTEPSVMLQGFIVRANCNGVLEDFDLKIARTGRGAIYVDQYMCGADGKPVIEGDFKDYFGDEDIIEFEGEEYHCAWTTVRDEKPLNQQTLFTIQEIQYNLDIPHKLPNCATRHVAPPVKKNSKIVLSEDYKKLYDIFGSPFMGNGDCLSKCFDTLHFIAATLRCPCGSESSGVGDWTGFKTACCGLSGKVKGVTLGDIKPGDAVVTSMSAGKGVKFFANCVLQYAGDVEGVSIWKVIKTFTVDETVCTPGFEGELNDFIKPESKSLVACSVKRAFITGDIDDAVHDCIITGKLDLSTNLFGNVGLLFKKTPWFVQKCGALFVDAWKVVEELCGSLTLTYKQIYEVVASLCTSAFTIVNYKPTFVVPDNRVKDLVDKCVKVLVKAFDVFTQIITIAGIEAKCFVLGAKYLLFNNALVKLVSVKILGKKQKGLECAFFATSLVGATVNVTPKRTETATISLNKVDDVVAPGEGYIVIVGDMAFYKSGEYYFMMSSPNFVLTNNVFKAVKVPSYDIVYDVDNDTKSKMIAKLGSSFEYDGDIDAAIVKVNELLIEFRQQSLCFRAFKDDKSIFVEAYFKKYKMPACLAKHIGLWNIIKKDSCKRGFLNLFNHLNELEDIKETNIQAIKNILCPDPLLDLDYGAIWYNCMPGCSDPSVLGSVQLLIGNGVKVVCDGCKGFANQLSKGYNKLCNAARNDIEIGGIPFSTFKTPTNTFIEMTDAIYSVIEQGKALSFRDADVPVVDNGTISTADWSEPILLEPAEYVKPKNNGNVIVIAGYTFYKDEDEHFYPYGFGKIVQRMYNKMGGGDKTVSFSEEVDVQEIAPVTRVKLEFEFDNEIVTGVLERAIGTRYKFTGTTWEEFEESISEELDAIFDTLANQGVELEGYFIYDTCGGFDIKNPDGIMISQYDINITADEKSEVSASSEEEEVESVEEDPENEIVEASEGAEGTSSQEEVETVEVADITSTEEDVDIVEVSAKDDPWAAAVDVQEAEQFNPSLPPFKTTNLNGKIILKQGDNNCWINACCYQLQAFDFFNNEAWEKFKKGDVMDFVNLCYAATTLARGHSGDAEYLLELMLNDYSTAKIVLAAKCGCGEKEIVLERAVFKLTPLKESFNYGVCGDCMQVNTCRFLSVEGSGVFVHDILSKQTPEAMFVVKPVMHAVYTGTTQNGHYMVDDIEHGYCVDGMGIKPLKKRCYTSTLFINANVMTRAEKPKQEFKVEKVEQQPIVEENKSSIEKEEIQSPKNDDLILPFYKAGKLSFYQGALDVLINFLEPDVIVNAANGDLKHMGGVARAIDVFTGGKLTERSKDYLKKNKSIAPGNAVFFENVIEHLSVLNAVGPRNGDSRVEAKLCNVYKAIAKCEGKILTPLISVGIFNVRLETSLQCLLKTVNDRGLNVFVYTDQERQTIENFFSCSIPVNVTEDNVNHERVSVSFDKTYGEQLKGTVVIKDKDVTNQLPSAFDVGQKVIKAIDIDWQAHYGFRDAAAFSASSHDAYKFEVVTHSNFIVHKQTDNNCWINAICLALQRLKPQWKFPGVRGLWNEFLERKTQGFVHMLYHISGVKKGEPGDAELMLHKLGDLMDNDCEIIVTHTTACDKCAKVEKFVGPVVAAPLAIHGTDETCVHGVSVNVKVTQIKGTVAITSLIGPIIGEVLEATGYICYSGSNRNGHYTYYDNRNGLVVDAEKAYHFNRDLLQVTTAIASNFVVKKPQAEERPKNCAFNKVAASPKIVQEQKLLAIESGANYALTEFGRYADMFFMAGDKILRLLLEVFKYLLVLFMCLRSTKMPKVKVKPPLAFKDFGAKVRTLNYMRQLNKPSVWRYAKLVLLLIAIYNFFYLFVSIPVVHKLTCNGAVQAYKNSSFIKSAVCGNSILCKACLASYDELADFQHLQVTWDFKSDPLWNRLVQLSYFAFLAVFGNNYVRCFLMYFVSQYLNLWLSYFGYVEYSWFLHVVNFESISAEFVIVVIVVKAVLALKHIVFACSNPSCKTCSRTARQTRIPIQVVVNGSMKTVYVHANGTGKFCKKHNFYCKNCDSYGFENTFICDEIVRDLSNSVKQTVYATDRSHQEVTKVECSDGFYRFYVGDEFTSYDYDVKHKKYSSQEVLKSMLLLDDFIVYSPSGSALANVRNACVYFSQLIGKPIKIVNSDLLEDLSVDFKGALFNAKKNVIKNSFNVDVSECKNLDECYRACNLNVSFSTFEMAVNNAHRFGILITDRSFNNFWPSKVKPGSSGVSAMDIGKCMTSDAKIVNAKVLTQRGKSVVWLSQDFAALSSTAQKVLVKTFVEEGVNFSLTFNAVGSDDDLPYERFTESVSPKSGSGFFDVITQLKQIVILVFVFIFICGLCSVYSVATQSYIESAEGYDYMVIKNGIVQPFDDTISCVHNTYKGFGDWFKAKYGFIPTFGKSCPIVVGTVFDLENMRPIPDVPAYVSIVGRSLVFAINAAFGVTNMCYDHTGNAVSKDSYFDTCVFNTACTTLTGLGGTIVYCAKQGLVEGAKLYSDLMPDYYYEHASGNMVKLPAIIRGLGLRFVKTQATTYCRVGECIDSKAGFCFGGDNWFVYDNEFGNGYICGNSVLGFFKNVFKLFNSNMSVVATSGAMLVNIIIACLAIAMCYGVLKFKKIFGDCTFLIVMIIVTLVVNNVSYFVTQNTFFMIIYAIVYYFITRKLAYPGILDAGFIIAYINMAPWYVITAYILVFLYDSLPSLFKLKVSTNLFEGDKFVGNFESAAMGTFVIDMRSYETIVNSTSIARIKSYANSFNKYKYYTGSMGEADYRMACYAHLGKALMDYSVNRTDMLYTPPTVSVNSTLQSGLRKMAQPSGLVEPCIVRVSYGNNVLNGLWLGDEVICPRHVIASDTTRVINYENEMSSVRLHNFSVSKNNVFLGVVSARYKGVNLVLKVNQVNPNTPEHKFKSIKAGESFNILACYEGCPGSVYGVNMRSQGTIKGSFIAGTCGSVGYVLENGILYFVYMHHLELGNGSHVGSNFEGEMYGGYEDQPSMQLEGTNVMSSDNVVAFLYAALINGERWFVTNTSMSLESYNTWAKTNSFTELSSTDAFSMLAAKTGQSVEKLLDSIVRLNKGFGGRTILSYGSLCDEFTPTEVIRQMYGVNLQAGKVKSFFYPIMTAMTILFAFWLEFFMYTPFTWINPTFVSIVLAVTTLISTVFVSGIKHKMLFFMSFVLPSVILVTAHNLFWDFSYYESLQSIVENTNTMFLPVDMQGVMLTVFCFIVFVTYSVRFFTCKQSWFSLAVTTILVIFNMVKIFGTSDEPWTENQIAFCFVNMLTMIVSLTTKDWMVVIASYRIAYYIVVCVMPSAFVSDFGFMKCISIVYMACGYLFCCYYGILYWVNRFTCMTCGVYQFTVSAAELKYMTANNLSAPKNAYDAMILSAKLIGVGGKRNIKISTVQSKLTEMKCTNVVLLGLLSKMHVESNSKEWNYCVGLHNEINLCDDPEIVLEKLLALIAFFLSKHNTCDLSELIESYFENTTILQSVASAYAALPSWIALEKARADLEEAKKNDVSPQILKQLTKAFNIAKSDFEREASVQKKLDKMAEQAAASMYKEARAVDRKSKIVSAMHSLLFGMLKKLDMSSVNTIIDQARNGVLPLSIIPAASATRLVVITPSLEVFSKIRQENNVHYAGAIWTIVEVKDANGSHVHLKEVTAANELNLTWPLSITCERTTKLQNNEIMPGKLKERAVRASATLDGEAFGSGKALMASESGKSFMYAFIASDNNLKYVKWESNNDIIPIELEAPLRFYVDGANGPEVKYLYFVKNLNTLRRGAVLGYIGATVRLQAGKPTEHPSNSSLLTLCAFSPDPAKAYVDAVKRGMQPVNNCVKMLSNGAGNGMAVTNGVEANTQQDSYGGASVCIYCRCHVEHPAIDGLCRYKGKFVQIPTGTQDPIRFCIENEVCVVCGCWLNNGCMCDRTSMQSFTVDQSYLFKRVRGSSAARLEPCNGTDPDHVSRAFDIYNKDVACIGKFLKTNCSRFRNLDKHDAYYIVKRCTKTVMDHEQVCYNDLKDSGAVAEHDFFTYKEGRCEFGNVARRNLTKYTMMDLCYAIRNFDEKNCEVLKEILVTVGACTEEFFENKDWFDPVENEAIHEVYAKLGPIVANAMLKCVAFCDAIVEKGYIGVITLDNQDLNGNFYDFGDFVKTAPGFGCACVTSYYSYMMPLMGMTSCLESENFVKSDIYGSDYKQYDLLAYDFTEHKEYLFQKYFKYWDRTYHPNCSDCTSDECIIHCANFNTLFSMTIPMTAFGPLVRKVHIDGVPVVVTAGYHFKQLGIVWNLDVKLDTMKLSMTDLLRFVTDPTLLVASSPALLDQRTVCFSIAALSTGITYQTVKPGHFNKDFYDFITERGFFEEGSELTLKHFFFAQGGEAAMTDFNYYRYNRVTVLDICQAQFVYKIVGKYFECYDGGCINAREVVVTNYDKSAGYPLNKFGKARLYYETLSYEEQDALFALTKRNVLPTMTQMNLKYAISGKARARTVGGVSLLSTMTTRQYHQKHLKSIAATRNATVVIGSTKFYGGWDNMLKNLMRDVDNGCLMGWDYPKCDRALPNMIRMASAMILGSKHVGCCTHNDRFYRLSNELAQVLTEVVHCTGGFYFKPGGTTSGDGTTAYANSAFNIFQAVSANVNKLLGVDSNACNNVTVKSIQRKIYDNCYRSSSIDEEFVVEYFSYLRKHFSMMILSDDGVVCYNKDYADLGYVADINAFKATLYYQNNVFMSTSKCWVEPDLSVGPHEFCSQHTLQIVGPDGDYYLPYPDPSRILSAGVFVDDIVKTDNVIMLERYVSLAIDAYPLTKHPKPAYQKVFYTLLDWVKHLQKNLNAGVLDSFSVTMLEEGQDKFWSEEFYASLYEKSTVLQAAGMCVVCGSQTVLRCGDCLRRPLLCTKCAYDHVMGTKHKFIMSITPYVCSFNGCNVNDVTKLFLGGLSYYCMNHKPQLSFPLCANGNVFGLYKSSAVGSEAVEDFNKLAVSDWTNVEDYKLANNVKESLKIFAAETVKAKEESVKSEYAYAVLKEVIGPKEIVLQWEASKTKPPLNRNSVFTCFQISKDTKIQLGEFVFEQSEYGSDSVYYKSTSTYKLTPGMIFVLTSHNVSPLKAPILVNQEKYNTISKLYPVFNIAEAYNTLVPYYQMIGKQKFTTIQGPPGSGKSHCVIGLGLYYPQARIVYTACSHAAVDALCEKAAKNFNVDRCSRIIPQRIRVDCYTGFKPNNTNAQYLFCTVNALPEASCDIVVVDEVSMCTNYDLSVINSRLSYKHIVYVGDPQQLPAPRTLINKGVLQPQDYNVVTKRMCTLGPDVFLHKCYRCPAEIVKTVSALVYENKFVPVNPESKQCFKMFVKGQVQIESNSSINNKQLEVVKAFLAHNPKWRKAVFISPYNSQNYVARRLLGLQTQTVDSAQGSEYDYVIYTQTSDTQHATNVNRFNVAITRAKVGILCIMCDRTMYENLDFYELKDSKIGLQAKPETCGLFKDCSKSEQYIPPAYATTYMSLSDNFKTSDGLAVNIGTKDVKYANVISYMGFRFEANIPGYHTLFCTRDFAMRNVRAWLGFDVEGAHVCGDNVGTNVPLQLGFSNGVDFVVQTEGCVITEKGNSIEVVKARAPPGEQFAHLIPLMRKGQPWHIVRRRIVQMVCDYFDGLSDILIFVLWAGGLELTTMRYFVKIGRPQKCECGKSATCYSSSQSVYACFKHALGCDYLYNPYCIDIQQWGYTGSLSMNHHEVCNIHRNEHVASGDAIMTRCLAIHDCFVKRVDWSIVYPFIDNEEKINKAGRIVQSHVMKAALKIFNPAAIHDVGNPKGIRCATTPIPWFCYDRDPINNNVRCLDYDYMVHGQMNGLMLFWNCNVDMYPEFSIVCRFDTRTRSKLSLEGCNGGALYVNNHAFHTPAYDRRAFAKLKPMPFFYYDDSNCELVDGQPNYVPLKSNVCITKCNIGGAVCKKHAALYRAYVEDYNIFMQAGFTIWCPQNFDTYMLWHGFVNSKALQSLENVAFNVVKKGAFTGLKGDLPTAVIADKIMVRDGPTDKCIFTNKTSLPTNVAFELYAKRKLGLTPPLTILRNLGVVATYKFVLWDYEAERPFSNFTKQVCSYTDLDSEVVTCFDNSIAGSFERFTTTRDAVLISNNAVKGLSAIKLQYGLLNDLPVSTVGNKPVTWYIYVRKNGEYVEQIDSYYTQGRTFETFKPRSTMEEDFLSMDTTLFIQKYGLEDYGFEHVVFGDVSKTTIGGMHLLISQVRLAKMGLFSVQEFMNNSDSTLKSCCITYADDPSSKNVCTYMDILLDDFVTIIKSLDLNVVSKVVDVIVDCKAWRWMLWCENSHIKTFYPQLQSAEWNPGYSMPTLYKIQRMCLERCNLYNYGAQVKLPDGITTNVVKYTQLCQYLNTTTLCVPHKMRVLHLGAAGASGVAPGSTVLRRWLPDDAILVDNDLRDYVSDADFSVTGDCTSLYIEDKFDLLVSDLYDGSTKSIDGENTSKDGFFTYINGFIKEKLSLGGSVAIKITEFSWNKDLYELIQRFEYWTVFCTSVNTSSSEGFLIGINYLGPYCDKAIVDGNIMHANYIFWRNSTIMALSHNSVLDTPKFKCRCNNALIVNLKEKELNEMVIGLLRKGKLLIRNNGKLLNFGNHFVNTP

SEQ ID NO: 21 - protein, 6603 aa, avian infectious bronchitis virus
  MISC_FEATURE: ORF 1AB
MASSLKQGVSPKPRDVILVSKDIPEQLCDALFFYTSHNPKDYADAFAVRQKFDRSLQTGKQFKFETVCGLFLLKGVDKITPGVPAKVLKATSKLADLEDIFGVSPLARKYRELLKTACQWSLTVEALDVRAQTLDEIFDPTEILWLQVAAKIHVSSMAMRRLVGEVTAKVMDALGSNLSALFQIVKQQIARIFQKALAIFENVNELPQRIAALKMAFAKCARSITVVVVERTLVVKEFAGTCLASINGAVAKFFEELPNGFMGSKIFTTLAFFKEAAVRVVENIPNAPRGTKGFEVVGNAKGTQVVVRGMRNDLTLLDQKADIPVEPEGWSAILDGHLCYVFRSGDRFYAAPLSGNFALSDVHCCERVVCLSDGVTPEINDGLILAAIYSSFSVSELVTALKKGEPFKFLGHKFVYAKDAAVSFTLAKAATIADVLRLFQSARVIAEDVWSSFTEKSFEFWKLAYGKVRNLEEFVKTYVCKAQMSIVILAAVLGEDIWHLVSQVIYKLGVLFTKVVDFCDKHWKGFCVQLKRAKLIVTETFCVLKGVAQHCFQLLLDAIHSLYKSFKKCALGRIHGDLLFWKGGVHKIVQDGDEIWFDAIDSVDVEDLGVVQEKSIDFEVCDDVTLPENQPGHMVQIEDDGKNYMFFRFKKDENIYYTPMSQLGAINVVCKAGGKTVTFGETTVQEIPPPDVVPIKVSIECCGEPWNTIFKKAYKEPIEVDTDLTVEQLLSVIYEKMCDDLKLFPEAPEPPPFENVALVDKNGKDLDCIKSCHLIYRDYESDDDIEEEDAEECDTDSGEAEECDTNSECEEEDEDTKVLALIQDPASIKYPLPLDEDYSVYNGCIVHKDALDVVNLPSGEETFVVNNCFEGAVKPLPQKVVDVLGDWGEAVDAQEQLCQQEPLQHTFEEPVENSTGSSKTMTEQVVVEDQELPVVEQDQDVVVYTPTDLEVAKETAEEVDEFILIFAVPKEEVVSQKDGAQIKQEPIQVVKPQREKKAKKFKVKPATCEKPKFLEYKTCVGDLTVVIAKALDEFKEFCIVNAANEHMTHGSGVAKAIADFCGLDFVEYCEDYVKKHGPQQRLVTPSFVKGIQCVNNVVGPRHGDNNLHEKLVAAYKNVLVDGVVNYVVPVLSLGIFGVDFKMSIDAMREAFEGCTIRVLLFSLSQEHIDYFDVTCKQKTIYLTEDGVKYRSIVLKPGDSLGQFGQVYAKNKIVFTADDVEDKEILYVPTTDKSILEYYGLDAQKYVIYLQTLAQKWNVQYRDNFLILEWRDGNCWISSAIVLLQAAKIRFKGFLTEAWAKLLGGDPTDFVAWCYASCTAKVGDFSDANWLLANLAEHFDADYTNAFLKKRVSCNCGIKSYELRGLEACIQPVRATNLLHFKTQYSNCPTCGANNTDEVIEASLPYLLLFATDGPATVDCDEDAVGTVVFVGSTNSGHCYTQAAGQAFDNLAKDRKFGKKSPYITAMYTRFAFKNETSLPVAKQSKGKSKSVKEDVSNLATSSKASFDNLTDFEQWYDSNIYESLKVQESPDNFDKYVSFTTKEDSKLPLTLKVRGIKSVVDFRSKDGFIYKLTPDTDENSKAPVYYPVLDAISLKAIWVEGNANFVVGHPNYYSKSLHIPTFWENAENFVKMGDKIGGVTMGLWRAEHLNKPNLERIFNIAKKAIVGSSVVTTQCGKLIGKAATFIADKVGGGVVRNITDSIKGLCGITRGHFERKMSPQFLKTLMFFLFYFLKASVKSVVASYKTVLCKVVLATLLIVWFVYTSNPVMFTGIRVLDFLFEGSLCGPYKDYGKDSFDVLRYCADDFICRVCLHDKDSLHLYKHAYSVEQVYKDAASGFIFNWNWLYLVFLILFVKPVAGFVIICYCVKYLVLNSTVLQTGVCFLDWFVQTVFSHFNFMGAGFYFWLFYKIYIQVHHILYCKDVTCEVCKRVARSNRQEVSVVVGGRKQIVHVYTNSGYNFCKRHNWYCRNCDDYGHQNTFMSPEVAGELSEKLKRHVKPTAYAYHVVDEACLVDDFVNLKYKAATPGKDSASSAVKCFSVTDFLKKAVFLKEALKCEQISNDGFIVCNTQSAHALEEAKNAAIYYAQYLCKPILILDQALYEQLVVEPVSKSVIDKVCSILSSIISVDTAALNYKAGTLRDALLSITKDEEAVDMAIFCHNHDVDYTGDGFTNVIPSYGIDTGKLTPRDRGFLINADASIANLRVKNAPPVVWKFSELIKLSDSCLKYLISATVKSGVRFFITKSGAKQVIACHTQKLLVEKKAGGIVSGTFKCFKSYFKWLLIFYILFTACCSGYYYMEVSKSFVHPMYDVNSTLHVEGFKVIDKGVLREIVPEDTCFSNKFVNFDAFWGRPYDNSRNCPIVTAVIDGDGTVATGVPGFVSWVMDGVMFIHMTQTERKPWYIPTWFNREIVGYTQDSIITEGSFYTSIALFSARCLYLTASNTPQLYCFNGDNDAPGALPFGSIIPHRVYFQPNGVRLIVPQQILHTPYVVKFVSDSYCRGSVCEYTRPGYCVSLNPQWVLFNDEYTSKPGVFCGSTVRELMFSMVSTFFTGVNPNIYMQLATMFLILVVVVLIFAMVIKFQGVFKAYATTVFITMLVWVINAFILCVHSYNSVLAVILLVLYCYASLVTSRNTVIIMHCWLVFTFGLIVPTWLACCYLGFIIYMYTPLFLWCYGTTKNTRKLYDGNEFVGNYDLAAKSTFVIRGSEFVKLTNEIGDKFEAYLSAYARLKYYSGTGSEQDYLQACRAWLAYALDQYRNSGVEIVYTPPRYSIGVSRLQSGFKKLVSPSSAVEKCIVSVSYRGNNLNGLWLGDTIYCPRHVLGKFSGDQWNDVLNLANNHEFEVTTQHGVTLNVVSRRLKGAVLILQTAVANAETPKYKFIKANCGDSFTIACAYGGTVVGLYPVTMRSNGTIRASFLAGACGSVGFNIEKGVVNFFYMHHLELPNALHTGTDLMGEFYGGYVDEEVAQRVPPDNLVTNNIVAWLYAAIISVKESSFSLPKWLESTTVSVDDYNKWAGDNGFTPFSTSTAITKLSAITGVDVCKLLRTIMVKNSQWGGDPILGQYNFEDELTPESVFNQIGGVRLQSSFVRKATSWFWSRCVLACFLFVLCAIVLFTAVPLKFYVYAAVILLMAVLFISFTVKHVMAYMDTFLLPTLITVIIGVCAEVPFIYNTLISQVVIFLSQWYDPVVFDTMVPWMFLPLVLYTAFKCVQGCYMNSFNTSLLMLYQFVKLGFVIYTSSNTLTAYTEGNWELFFELVHTTVLANVSSNSLIGLFVFKCAKWMLYYCNATYLNNYVLMAVMVNCIGWLCTCYFGLYWWVNKVFGLTLGKYNFKVSVDQYRYMCLHKINPPKTVWEVFSTNILIQGIGGDRVLPIATVQAKLSDVKCTTVVLMQLLTKLNVEANSKMHVYLVELHNKILASDDVGECMDNLLGMLITLFCIDSTIDLSEYCDDILKRSTVLQSVTQEFSHIPSYAEYERAKNLYEKVLVDSKNGGVTQQELAAYRKAANIAKSVFDRDLAVQKKLDSMAERAMTTMYKEARVTDRRAKLVSSLHALLFSMLKKIDSEKLNVLFDQASSGVVPLATVPIVCSNKLTLVIPDPETWVKCVEGVHVTYSTVVWNIDTVIDADGTELHPTSTGSGLTYCISGANIAWPLKVNLTRNGHNKVDVVLQNNELMPHGVKTKACVAGVDQAHCSVESKCYYTNISGNSVVAAITSSNPNLKVASFLNEAGNQIYVDLDPPCKFGMKVGVKVEVVYLYFIKNTRSIVRGMVLGAISNVVVLQSKGHETEEVDAVGILSLCSFAVDPADTYCKYVAAGNQPLGNCVKMLTVHNGSGFAITSKPSPTPDQDSYGGASVCLYCRAHIAHPGSVGNLDGRCQFKGSFVQIPTTEKDPVGFCLRNKVCTVCQCWIGYGCQCDSLRQPKSSVQSVAGASDFDKNYLNGYGVAVRLGMFQNLKRNCARFQELRDTEDGNLEYLDSYFVVKQTTPSNYEHEKSCYEDLKSEVTADHDFFVFNKNIYNISRQRLTKYTMMDFCYALRHFDPKDCEVLKEILVTYGCIEDYHPKWFEENKDWYDPIENSKYYVMLAKMGPIVRRALLNAIEFGNLMVEKGYVGVITLDNQDLNGKFYDFGDFQKTAPGAGVPVFDTYYSYMMPIIAMTDALAPERYFEYDVHKGYKSYDLLKYDYTEEKQELFQKYFKYWDQEYHPNCRDCSDDRCLIHCANFNILFSTLIPQTSFGNLCRKVFVDGVPFIATCGYHSKELGVIMNQDNTMSFSKMGLSQLMQFVGDPALLVGTSNNLVDLRTSCFSVCALTSGITHQTVKPGHFNKDFYDFAEKAGMFKEGSSIPLKHFFYPQTGNAAINDYDYYRYNRPTMFDICQLLFCLEVTSKYFECYEGGCIPASQVVVNNLDKSAGYPFNKFGKARLYYEMSLEEQDQLFEITKKNVLPTITQMNLKYAISAKNRARTVAGVSILSTMTNRQFHQKILKSIVNTRNASVVIGTTKFYGGWDNMLRNLIQGVEDPILMGWDYPKCDRAMPNLLRIAASLVLARKHTNCCSWSERIYRLYNECAQVLSETVLATGGIYVKPGGTSSGDATTAYANSVFNIIQATSANVARLLSVITRDIVYDNIKSLQYELYQQVYRRVNFDPAFVEKFYSYLCKNFSLMILSDDGVVCYNNTLAKQGLVADISGFREVLYYQNNVFMADSKCWVEPDLEKGPHEFCSQHTMLVEVDGEPKYLPYPDPSRILGACVFVDDVDKTEPVAVMERYIALAIDAYPLVHHENEEYKKVFFVLLAYIRKLYQELSQNMLMDYSFVMDIDKGSKFWEQEFYENMYRAPTTLQSCGVCVVCNSQTILRCGNCIRKPFLCCKCCYDHVMHTDHKNVLSINPYICSQLGCGEADVTKLYLGGMSYFCGNHKPKLSIPLVSNGTVFGIYRANCAGSENVDDFNQLATTNWSIVEPYILANRCSDSLRRFAAETVKATEELHKQQFASAEVREVFSDRELILSWEPGKTRPPLNRNYVFTGYHFTRTSKVQLGDFTFEKGEGKDVVYYKATSTAKLSVGDIFVLTSHNVVSLVAPTLCPQQTFSRFVNLRPNVMVPECFVNNIPLYHLVGKQKRTTVQGPPGSGKSHFAIGLAVYFSSARVVFTACSHAAVDALCEKAFKFLKVDDCTRIVPQRTTVDCFSKFKANDTGKKYIFSTINALPEVSCDILLVDEVSMLTNYELSFINGKINYQYVVYVGDPAQLPAPRTLLNGSLSPKDYNVVTNLMVCVKPDIFLAKCYRCPKEIVDTVSTLVYDGKFIANNPESRECFKVIVNNGNSDVGHESGSAYNTTQLEFVKDFVCRNKQWREAIFISPYNAMNQRAYRMLGLNVQTVDSSQGSEYDYVIFCVTADSQHALNINRFNVALTRAKRGILVVMRQRDELYSALKFTELDSETSLQGTGLFKICNKEFSGVHPAYAVTTKALAATYKVNDELAALVNVEAGSEITYKHLISLLGFKMSVNVEGCHNMFITRDEAIRNVRGWVGFDVEATHACGTNIGTNLPFQVGFSTGADFVVTPEGLVDTSIGNNFEPVNSKAPPGEQFNHLRVLFKSAKPWHVIRPRIVQMLADNLCNVSDCVVFVTWCHGLELTTLRYFVKIGKEQVCSCGSRATTFNSHTQAYACWKHCLGFDFVYNPLLVDIQQWGYSGNLQFNHDLHCNVHGHAHVASVDAIMTRCLAINNAFCQDVNWDLTYPHIANEDEVNSSCRYLQRMYLNACVDALKVNVVYDIGNPKGIKCVRRGDVNFRFYDKNPIVRNVKQFEYDYNQHKDKFADGLCMFWNCNVDCYPDNSLVCRYDTRNLSVFNLPGCNGGSLYVNKHAFYTPKFDRISFRNLKAMPFFFYDSSPCETIQVDGVAQDLVSLATKDCITKCNIGGAVCKKHAQMYAEFVTSYNAAVTAGFTFWVTNKLNPYNLWKSFSALQSIDNIAYNMYKGGHYDAIAGEMPTVITGDKVFVIDQGVEKAVFVNQTTLPTSVAFELYAKRNIRTLPNNRILKGLGVDVTNGFVIWDYANQTPLYRNTVKVCAYTDIEPNGLVVLYDDRYGDYQSFLAADNAVLVSTQCYKRYSYVEIPSNLLVQNGMPLKDGANLYVYKRVNGAFVTLPNTINTQGRSYETFEPRSDIERDFLAMSEESFVERYGKDLGLQHILYGEVDKPQLGGLHTVIGMYRLLRANKLNAKSVTNSDSDVMQNYFVLSDNGSYKQVCTVVDLLLDDFLELLRNILKEYGTNKSKVVTVSIDYHSINFMTWFEDGSIKTCYPQLQSAWTCGYNMPELYKVQNCVMEPCNIPNYGVGITLPSGILMNVAKYTQLCQYLSKTTICVPHNMRVMHFGAGSDKGVAPGSTVLKQWLPEGTLLVDNDIVDYVSDAHVSVLSDCNKYNTEHKFDLVISDMYTDNDSKRKHEGVIANNGNDDVFIYLSSFLRNNLALGGSFAVKVTETSWHEVLYDIAQDCAWWTMFCTAVNASSSEAFLIGVNYLGASEKVKVSGKTLHANYIFWRNCNYLQTSAYSIFDVAKFDLRLKATPVVNLKTEQKTDLVFNLIKCGKLLVRDVGNTSFTSDSFVCTM

SEQ ID NO: 22 - protein, 7058 aa, Bovine Coronavirus
  MISC_FEATURE: ORF 1AB
MSKINKYGLELHWAPEFPWMFEDAEEKLDNPSSSEVDIVCSTTAQKLETGGICPENHVMVDCRRLLKQECCVQSSLIREIVMNTRPYDLEVLLQDALQSREAVLVTPPLGMSLEACYVRGCNPNGWTMGLFRRRSVCNTGRCAVNKHVAYQLYMIDPAGVCFGAGQFVGWVIPLAFMPVQSRKFIAPWVMYLRKCGEKGAYIKDYKRGGFEHVYNFKVEDAYDLVHDEPKGKFSKKAYALIRGYRGVKPLLYVDQYGCDYTGGLADGLEAYADKTLQEMKALFPIWSQELPFDVTVAWHVVRDPRYVMRLQSASTIRSVAYVANPTEDLCDGSVVIKEPVHVYADDSIILRQHNLVDIMSCFYMEADAVVNAFYGVDLKDCGFVMQFGYIDCEQDLCDFKGWVPGNMIDGFACTTCGHVYETGDLLAQSSGVLPVNPVLHTKSAAGYGGFGCKDSFTLYGQTVVYFGGCVYWSPARNIWIPILKSSVKSYDGLVYTGVVGCKAIVKETNLICKALYLDYVQHKCGNLHQRELLGVSDVWHKQLLLNRGVYKPLLENIDYFNMRRAKFSLETFTVCADGFMPFLLDDLVPRAYYLAVSGQAFCDYAGKICHAVVSKSKELLDVSVDSLGAAIHYLNSKIVDLAQHFSDFGTSFVSKIVHFFKTFTTSTALAFAWVLFHVLHGAYIVVESDIYFGKNIPRYASAVAQAFRSGAKVGLDSLRVTFIDGLSCFKIGRRRICLSGSKIYEVERGLLHSSQLPLDVYDLTMPSQVQKTKQKGIYLKGSGSDFSLADSVVEVVTTSLTPCGYSEPPKVADKICIVDNVYMAKAGDKYYPVVVDGHVGLLDQAWRVPCAGRCVTFKEQPTVNEIASTPKTIKVFYELDKDFNTILNTACGEFEVDDTVDMEEFYAVVIDAIEEKLSPCKELEGVGAKVSAFLQKLEDNSLFLFDEAGEEVLAPKLYCAFTAPEDDDFLEESGVEEDDVEGEETDLTVTSAGEPCVASEQEESSEILEDTLDDGPCVETSDSQVEEDVQMSDFGDLESVIQDYENVCFEFYTTEPEFVKVLDLYVPKATRNNCWLRSVLAVMQKLPCQFKDKNLQDLWVLYKQQYSQLFVDTLVNKIPANIVVPQGGYVADFAYWFLTLCDWQCVAYWKCIKCDLALKLKGLDAMFFYGDVVSHVCKCGESMVLIDVDVPFTAHFALKDKLFCAFITKRSVYKAACVVDVNDSHSMAVVDGKQIDDHRITSITSDKFDFIIGHGTSFSMTTFEIAQLYGSCITPNVCFVKGDIIKVSKRVKAEVVVNPANGHMAHGGGVAKAIAVAAGQQFVKETTDMVKSKGVCATGDCYVSTGGKLCKTVLNVVGPDARTQGKQSYALLERVYKHLNKYDCVVTTLISAGIFSVPSDVSLTYLLGTAKKQVVLVSNNQEDFDLISKCQITAVEGTKKLAERLSFNVGRSIVYETDANKLILSNDVAFVSTFNVLQDVLSLRHDIALDDDARTFVQSNVDVVPEGWRVVNKFYQINGVRPVKYFECPGGIDICSQDKVFGYVQQGSFNKATVAQIKALFLDKVDILLTVDGVNFTNRFVPVGESFGKSLGNVFCDGVNVTKHKCDINYKGKVFFQFDNLSSEDLKAVRSSFNFDQKELLAYYNMLVNCSKWQVVFNGKYFTFKQANNNCFVNVSCLMLQSLNLKFKIVQWQEAWLEFRSGRPARFVSLVLAKGGFKFGDPADSRDFLRVVFSQVDLTGAICDFEIACKCGVKQEQRTGVDAVMHFGTLSREDLEIGYTVDCSCGKKLIHCVRFDVPFLICSNTPASVKLPKGVGSANIFKGDKVGHYVHVKCEQSYQLYDASNVKKVTDVTGNLSDCLYLKNLKQTFKSVLTTYYLDDVKKIEYKPDLSQYYCDGGKYYTQRIIKAQFKTFEKVDGVYTNFKLIGHTVCDILNAKLGFDSSKEFVEYKVTEWPTATGDVVLATDDLYVKRYERGCITFGKPVIWLSHEQASLNSLTYFNRPLLVDENKFDVLKVDDVDDGGDISESDAKEPKEINIIKLSGVKKPFKVEDSVIVNDDTSEIKYVKSLSIVDVYDMWLTGCRCVVRTANALSRAVNVPTIRKFIKFGMTLVSIPIDLLNLREIKPVFNVVKAVRNKISACFNFIKWLFVLLFGWIKISADNKVIYTTEVASKLTCKLVALAFKNAFLTFKWSVVARGACIIATIFLLWFNFIYANVIFSDFYLPKIGFLPTFVGKIVQWIKNTFSLVTICDLYSIQDVGFKNQYCNGSIACQFCLAGFDMLDNYKAIDVVQYEADRRAFVDYTGVLKIVIELIVSYALYTAWFYPLFALISIQILTTWLPELLMLSTLHWSVRLLVSLANMLPAHVFMRFYIIIASFIKLFSLFRHVAYGCSKSGCLFCYKRNRSLRVKCSTIVGGMIRYYDVMANGGTGFCSKHQWNCIDCDSYKPGNTFITVEAALDLSKELKRPIQPTDVAYHTVTDVKQVGCYMRLFYDRDGQRTYDDVNASLFVDYSNLLHSKVKSVPNMHVVVVENDADKANFLNAAVFYAQSLFRPILMVDKILITTANTGTSVTETMFDVYVDTFLSMFDVDKKSLNALIATAHSSIKQGTQICKVLDTFLSCARKSCSIDSDVDTKCLADSVMSAVSAGLELTDESCNNLVPTYLKGDNIVAADLGVLIQNSAKHVQGNVAKIAGVSCIWSVDAFNQLSSDFQHKLKKACCKTGLKLELTYNKQMANVSVLTTPFSLKGGAVFSYFVYVCFVLSLVCFIGLWCLMPTYTVHKSDFQLPVYASYKVLDNGVIRDVSVEDVCFANKFEQFDQWYESTFGLSYYSNSMACPIVVAVVDQDFGSTVFNVPTKVLRYGYHVLHFITHALSADGVQCYTPHSQISYSNFYASGCVLSSACTMFAMADGSPQPYCYTDGLMQNASLYSSLVPHVRYNLANAKGFIRLPEVLREGLVRIVRTRSMSYCRVGLCEEADEGICFNFNGSWVLNNDYYRSLPGTFCGRDVFDLIYQLFKGLAQPVDFLALTASSIAGAILAVIVVLGFYYLIKLKRAFGDYTSIVFVNVIVWCVNFMMLFVFQVYPTLSCVYAICYFYATLYFPSEISVIMHLQWLVMYGTIMPLWFCLLYISVVVSNHAFWVFSYCRQLGTSVRSDGTFEEMALTTFMITKDSYCKLKNSLSDVAFNRYLSLYNKYRYYSGKMDTAAYREAACSQLAKAMDTFTNNNGSDVLYQPPTASVSTSFLQSGIVKMVNPTSKVEPCIVSVTYGNMTLNGLWLDDKVYCPRHVICSASDMTNPDYTNLLCRVTSSDFTVLFDRLSLTVMSYQMQGCMLVLTVTLQNSRTPKYTFGVVKPGETFTVLAAYNGKPQGAFHVTMRSSYTIKGSFLCGSCGSVGYVIMGDCVKFVYMHQLELSTGCHTGTDFNGDFYGPYKDAQVVQLPVQDYIQSVNFVAWLYAAILNNCNWFVQSDKCSVEDFNVWALSNGFSQVKSDLVIDALASMTGVSLETLLAAIKRLKNGFQGRQIMGSCSFEDELTPSDVYQQLAGIKLQSKRTRLVKGIVCWIMASTFLFSCIITAFVKWTMFMYVTTNMLSITFCALCVISLAMLLVKHKHLYLTMYIIPVLFTLLYNNYLVVYKQTFRGYVYAWLSYYVPSVEYTYTDEVIYGMLLLIGMVFVTLRSINHDLFSFIMFVGRVISVVSLWYMGSNLEEEILLMLASLFGTYTWTTALSMAAAKVIAKWVAVNVLYFTDIPQIKIVLVCYLFIGYIISCYWGLFSLMNSLFRMPLGVYNYKISVQELRYMNANGLRPPKNSFEALMLNFKLLGIGGVPIIEVSQFQSKLTDVKCANGGLLNCLQHLHVASNSKLWQYCSTLHNEILATSDLGVAFEKLAQLLIVLFANPAAVDSKCLTSIEEVCDDYAKDNTVLQALQSEFVNMASFVEYEVAKKNLDEACSSGSANQQQLKQLEKACNIAKSAYERDRAVARKLERMADLALTNMYKEARINDKKSKVVSALQTMLFSMVRKLDNQALNSILDNAVKGCVPLNAIPSLAANTLTIIVPDKSVYDQVVDNVYVTYAGNVWQIQTIQDSDGTNKQLHEISDDCNWPLVIIANRHNEVSATVLQNNELMPAKLKTQVVNSGPDQTCNTPTQCYYNNSYNGKIVYAILSDVDGLKYTKILKDDGNFVVLELDPPCKFTVQDVKGLKIKYLYFVKGCNTLARGWVVGTISSTVRLQAGTATEYASNSSILSLCAFSVDPKKTYLDFIQQGGTPIANCVKMLCDHAGTGMAITVKPDATTSQDSYGGASVCIYCRARVEHPDVDGLCKLRGKFVQVPVGIKDPVSYVLTHDVCQVCGFWRDGSCSCVSTDTTVQSKDTFFKRVRGTSVDARLVPCASGLSTDVQLRAFDICNASVAGIGLHLKVNCCRFQRVDENGDKLDQFFVVKRTDLTIYNREMECYERVKDCKFVAEHDFFTFDVEGSRVPHIVRKDLTKYTMLDLCYALRHFDRNDCMLLCDILSIYAGCEQSYFTKKDWYDFVENPDIINVYKKLGPIFNRALVSATEFADKLVEVGLVGILTLDNQDLNGKWYDFGDYVIAAPGCGVAIADSYYSYMMPMLTMCHALDCELYVNNAYRLFDLVQYDFTDYKLELFNKYFKHWSMPYHPNTVDCQDDRCIIHCANFNILFSMVLPNTCFGPLVRQIFVDGVPFVVSIGYHYKELGIVMNMDVDTHRYRLSLKDLLLYAADPALHVASASALYDLRTCCFSVAAITSGVKFQTVKPGNFNQDFYDFILSKGLLKEGSSVDLKHFFFTQDGNAAITDYNYYKYNLPTMVDIKQLLFVLEVVYKYFEIYDGGCIPAAQVIVNNYDKSAGYPFNKFGKARLYYEALSFEEQDEIYAYTKRNVLPTLTQMNLKYAISAKNRARTVAGVSILSTMTGRMFHQKCLKSIAATRGVPVVIGTTKFYGGWDDMLRRLIKDVDNPVLMGWDYPKCDRAMPNILRIVSSLVLARKHEACCSQSDRFYRLANECAQVLSEIVMCGGCYYVKPGGTSSGDATTAFANSVFNICQAVSANVCALMSCNGNKIEDLSIRALQKRLYSHVYRSDMVDSTFVTEYYEFLNKHFSMMILSDDGVVCYNSDYASKGYIANISAFQQVLYYQNNVFMSESKCWVENDINNGPHEFCSQHTMLVKMDGDDVYLPYPVPSRILGAGCFVDDLLKTDSVLLIERFVSLAIDAYPLVYHENEEYQKVFRVYLEYIKKLYNELGNQILDSYSVILSTCDGQKFTDESFYKNMYLRSAVMQSVGACVVCSSQTSLRCGSCIRKPLLCCKCCYDHVMATDHKYVLSVSPYVCNAPGCDVNDVTKLYLGGMSYYCEDHKPQYSFKLVMNGMVFGLYKQSCTGSPYIDDFNRIASCKWTDVDDYILANECTERLKLFAAETQKATEEAFKQSYASATIQEIVSERELILSWEIGKVKPPLNKNYVFTGYHFTKNGKTVLGEYVFDKSELTNGVYYRATTTYKLSVGDVFVLTSHSVANLSAPTLVPQENYSSIRFASVYSVLETFQNNVVNYQHIGMKRYCTVQGPPGTGKSHLAIGLAVYYCTARVVYTAASHAAVDALCEKAYKFLNINDCTRIVPAKVRVECYDKFKINDTTRKYVFTTINALPEMVTDIVVVDEVSMLTNYELSVINARIRAKHYVYIGDPAQLPAPRVLLSKGTLEPKYFNTVTKLMCCLGPDIFLGTCYRCPKEIVDTVSALVYENKLKAKNESSSLCFKVYYKGVTTHESSSAVNMQQIYLINKFLKANPLWHKAVFISPYNSQNFAAKRVLGLQTQTVDSAQGSEYDYVIYSQTAETAHSVNVNRFNVAITRAKKGILCVMSNMQLFEALQFTTLTVDKVPQAVETRVQCSTNLFKDCSKSYSGYHPAHAPSFLAVDDKYKATGDLAVCLGIGDSAVTYSRLISLMGFKLDVTLDGYCKLFITKEEAVKRVRAWVGFDAEGAHATRDSIGTNFPLQLGFSTGIDFVVEATGLFADRDGYSFKKAVAKAPPGEQFKHLIPLMTRGQRWDVVRPRIVQMFADHLIDLSDCVVLVTWAANFELTCLRYFAKVGREISCNVSTKRATAYNSRTGYYGCWRHSVTCDYLYNPLIVDIQQWGYIGSLSSNHDLYCSVHKGAHVASSDAIMTRCLAVYDCFCNNINWNVEYPIISNELSINTSCRVLQRVMLKAAMLCNRYTLCYDIGNPKAIACVKDFDFKFYDAQPIVKSVKTLLYFFEAHKDSFKDGLCMFWNCNVDKYPPNAVVCRFDTRVLNNLNLPGCNGGSLYVNKHAFHTKPFSRAAFEHLKPMPFFYYSDTPCVYMDGMDAKQVDYVPLKSATCITRCNLGGAVCLKHAEEYREYLESYNTATTAGFTFWVYKTFDFYNLWNTFTKLQSLENVVYNLVKTGHYTGQAGEMPCAIINDKVVAKIDKEDVVIFINNTTYPTNVAVELFAKRSIRHHPELKLFRNLNIDVCWKHVIWDYARESIFCSNTYGVCMYTDLKLIDKLNVLFDGRDNGALEAFKRSNNGVYISTTKVKSLSMIRGPPRAELNGVVVDKVGDTDCVFYFAVRKEGQDVIFSQFDSLRVSSNQSPQGNLGSNEPGNVGGNDALATSTIFTQSRVISSFTCRTDMEKDFIALDQDVFIQKYGLEDYAFEHIVYGNFNQKIIGGLHLLIGLYRRQQTSNLVIQEFVSYDSSIHSYFITDEKSGGSKSVCTVIDILLDDFVALVKSLNLNCVSKVVNVNVDFKDFQFMLWCNDEKVMTFYPRLQAASDWKPGYSMPVLYKYLNSPMERVSLWNYGKPVTLPTGCMMNVAKYTQLCQYLNTTTLAVPVNTRVLHLGAGSEKGVAPGSAVLRQWLPAGTILRQWLPAGTILVHNDLYPFVSDSVATYFGDCITLPFDCQWDLIISDMYDLLLDIGVHVVRCSYIHCHMIRDKLALGGSVAIKITEFSWNAELYKLMGYFAFWTVFCTNANASSSEGFLIGINYLGKPKVEIDGNVMHAIICFGEIPQFGTGVLIACLIWLNSRLSWLVMP

SEQ ID NO: 23 - protein, 6724 aa, EMCR Coronavirus
  MISC_FEATURE: ORF 1AB
  MISC_FEATURE (4890)..(4890): Unknown amino acid
MFYNQVTLAVASDSEISGFGFAIPSVAVRAYSEAAAQGFQACRFVAFGLQDCVTGINDDDYVIALTGTNQLCAKILLFSDRPLNLRGWLIFSNSNYVLQDFDVVFGHGAGSVVFVDKYMCGFDGKPVLPKNMWEFRDYFNDNTDSIVIGGVTYQLAWDVIRKDLSYEQQNVLAIESIHYLGTTGHTLKSGCKLINAKPPKYSSKVVLSGEWNAVYKAFGSPFITNGISLLDIIVKPVFFNAFVKCNCGSENWSVGAWDGYLSSCCGTPAKKLCVVPGNVVPGDVIITSTDAGCGVKYYAGLVVKHITNITGVSLWRVTAVHSDGMFVATSSYDALLHRNSLDPFCFDVNTLLSNQLRLAFLGASVTEDVKFAASTGVIDISAGMFGLYDDILTNNKPWFVRKASGLFDAIWDAFVAAIKLVPTTTGGLVRFVKSIASTVLTVSNGVIIMCADVPDAFQPVYRTFTQAICAAFDFSLDVFKIGDVKFKRLGDYVLTENALVRLTTEVVRGVRDARIKKAMFTKVVVGPTTEVKFSVIELATVNLRLVDCAPVVCPKGKIVVIAGQAFFYSGGFYRFMVDSTTVLNDPVFTGELFYTIKFSGFKLDGFNHQFVNASSATDAIIAVELLLSDFKTAVFVYTCVVDGCSVIVRRDATFATHVCFKDCYSIWEQFCIDNCGEPWFLTDYNAILQSNNPQCAIVQASESKVLLERFLPKCPEILLSIDDGHLWNLFVEKFNFVTDWLKTLKLTLTSNGLLGNCAKRFRRVLVKLLDVYNGFLETVCSVVHTAGVCIKYYAVNVPYVVISGFVSRVIRRERCDVTFPCVSCVTFFYEFLDTCFGVSKPNAIDVEHLELKETVFVEPKDGGQFFVSDDYLWYVVDDIYYPASCNGVLPVAFTKLAGGKISFSDDVIVHDVEPTHKVKLIFEFEDDVVTSLCKKSFGKSIIYTGDWEGLHEVLTSAMNVIGQHIKLPQFYIYDEEGGYDVSKPVMISQWPISDDSDGCVVEASTDFHQLESVREEVDIIEQPFGEVEHALSIRQPFSFSFRDELGVRVLDQSDNNCWISTTLIQLQLTKLLDDSIEMQLFKVGKVDSIVQKCYELSHLISGSLGDSGKLLSELLKDKYTCSITFEMSCDCGKKFDEQVGCLFWIMPYTKLFQKGECCICHKMQTYKLVSMKGTGVFVQDPAPIDIDAFPVRPICSSVYLGVKGSGHYQTNLYSFDKAIDGFGVFDIKNSSVNTVCFVDVDFHSVEIEAGEVKPFAVYKNVKFYLGDISHLVNCVSFDFVVNAANENLMHGGGVARAIDILTEGQLQSLSKDYISSNGPLKVGAGVMLECEKFNVFNVVGPRTGKHEHSLLVEAYNSILFENGIPLMPLLSCGIFGVRIENSLKALFSCDINKPLQVFVYSSNEEQAVLKFLDGLDLTPVIDDVDVVKPFRVEGNFSFFDCGVNALDGDIYLLFTNSILMLDKQGQLLDTKLNGILQQAVLDYLATVKTVPAGNLVKLVVESCTIYMCVVPSINDLSFDKNLGRCVRKLNRLKTCVIANVPAIDVLKKLLSSLTLTVKFVVESNVMDVNDCFKNDNVVLKITEDGINVKDVVVESSKSLGKQLGVVSDGVDSFEGVLPINTDTVLSVAPEVDWVAFYGFEKAALFASLDVKPYGYPNDFVGGFRVLGTTDNNCWVNATCIILQYLKPTFKSKGLNVLWNKFVTGDVGPFVSFIYFITMSSKGQKGDAEEALSKLSEYLISDSIVTLEQYSTCDICKSTVVEVKSAVVCASVLKDGCDVGFCPHRHKLRSRVKFVNGRVVITNVGEPIISQPSKLLNGIAYTTFSGSFDNGHYVVYDAANNAVYDGARLFASDLSTLAVTAIVVVGGCVTSNVPPIVSEKISVMDKLDTGAQKFFQFGDFVMNNIVLFLTWLLSMFSLLRTSIMKHDIKVIAKAPKRTGVILTRSFKYNIRSALFVVKQKWCVIVTLFKFLLLLYAIYALVFMIVQFSPFNSLLCGDIVSGYEKSTFNKDIYCGNSMVCKMCLFSYQEFNDLDHTSLVWKHIRDPILISLQPFVILVILLIFGNMYLRFGLLYFVAQFISTFGSFLGFHQKQWFLHFVPFDVLCNEFLATFIVCKIVLFVRHIIVGCNNADCVACSKSARLKRVPLQTIINGMHKSFYVNANGGTCFCNKHNFFCVNCDSFGPGNTFINGDIARELGNVVKTAVQPTAPAYVIIDKVDFVNGFYRLYSGDTFWRYDFDITESKYSCKEVLKNCNVLENFIVYNNSGSNITQIKNACVYFSQLLCEPIKLVNSELLSTLSVDFNGVLHKAYVDVLCNSFFKELTANMSMAECKATLGLTVSDDDFVSAVANAHRYDVLLSDLSFNNFFISYAKPEDKLSVYDIACCMRAGSKVVNHNVLIKESIPIVWGVKDFNTLSQEGKKYLVKTTKAKGLTFLLTFNDNQAITQVPATSIVAKQGAGFKRTYNFLWYVCLFVVALFIGVSFIDYTTTVTSFHGYDFKYIENGQLKVFEAPLHCVRNVFDNFNQWHEAKFGVVTTNSDKCPIVVGVSERINVVPGVPTNVYLVGKTLVFTLQAAFGNTGVCYDFDGVTTSDKCIFNSACTRLEGLGGDNVYCYNTDLIEGSKPYSILQPNAYYKYDVKNYVRFPEILARGFGLRTIRTLATRYCRVGECRDSHKGVCFGFDKWYVNDGRVDDGYICGDGLIDLLVNVLSIFSSSFSVVAMSGHMLFNFLFAAFITFLCFLVTKFKRVFGDLSYGVFTVVCATLINNISYVVTQNLFFMLLYAILYFVFTRTVRYAWIWHIAYIVAYFLLIPWWLLTWFSFAAFLELLPNVFKLKISTQLFEGDKFIGTFESAAAGTFVLDMRSYERLINTISPEKLKNYAASYNKYKYYSGSASEADYRCACYAHLAKAMLDYAKDHNDMLYSPPTISYNSTLQSGLKKMAQPSGCVERCVVRVCYGSTVLNGVWLGDTVTCPRHVIAPSTTVLIDYDHAYSTMRLHNFSVSHNGVFLGVVGVTMHGSVLRIKVSQSNVHTPKHVFKTLKPGASFNILACYEGIASGVFGVNLRTNFTIKGSFINGACGSPGYNVRNDGTVEFCYLHQIELGSGAHVGSDFTGSVYGNFDDQPSLQVESANLMLSDNVVAFLYAALLNGCRWWLRSTRVNVDGFNEWAMANGYTIVSSVECYSILAAKTGVSVEQLLASIQHLHEGFGGKNILGYSSLCDEFTLAEVVKQMYGVNLQSGKVIFGLKTMFLFSVFFTMFWAELFIYTNTIWINPVILTPIFCLLLFLSLVLTMFLKHKFLFLQVFLLPTVIATALYNCVLDYYIVKFLADHFNYNVSVLQMDVQGLVNVLVCLFVVFLHTWRFSKERFTHWFTYVCSLIAVAYTYFYSGDFLSLLVMFLCAISSDWYIGAIVFRLSRLIIFFSPESVFSVFGDVKLTLVVYLICGYLVCTYWGILYWFNRFFKCTMGVYDFKVSAAEFKYMVANGLHAPYGPFDALWLSFKLLGIGGDRCIKISTVQSKLTDLKCTNVVLLGCLSSMNIAANSSEWAYCVDLHNKINLCDDPEKAQGMLLALLAFFLSKHSDFGLDGLIDSYFDNSSTLQSVASSFVSMPSYIAYENARQAYEDAIANGSSSQLIKQLKRAMNIAKSEFDHEISVQKKINRMAEQAATQMYKEARSVNRKSKVISAMHSLLFGMLRRLDMSSVETVLNLARDGVVPLSVIPATSASKLTIVSPDLESYSKIVCDGSVHYAGVVWTLNDVKDNDGRPVHVKEITRENVETLTWPLILNCERVVKLQNNEIMPGKLKQKPMKAEGDGGVLGDGNALYNTEGGKTFMYAYISNKADLKFVKWEYEGGCNTIELDSPCRFMVETPNGPQVKYLYFVKNLNTLRRGAVLGFIGATIRLQAGKQTELAVNSGLLTACAFSVDPATTYLEAVKHGAKPVSNCIKMLSNGAGNGQAITTSVDANTNQDSYGGASICLYCRAHVPHPSMDGYCKFKGKCVQVPIGCLDPIRFCLENNVCNVCGCWLGHGCACDRTTIQSVDISYLNRARGSSAARLEPCNGTDIDKCVRAFDIYNKNVSFLGKCLKMNCVRFKNADLKDGYFVIKRCTKSVMEHEQSMYNLLNFSGALAEHDFFTWKDGRVIYGNVSRHNLTKYTMMDLVYAMRNFDEQNCDVLKEVLVLTGCCDNSYFDSKGWYDPVENEDIHRVYASLGKIVARAMLKCVALCDAMVAKGVVGVLTLDNQDLNGNFYDFGDFVVSLPNMGVPCCTSYYSYMMPIMGLTNCLASECFVKSDIFGSDFKTFDLLKYDFTEHKENLFNKYFKHWSFDYHPNCSDCYDDMCVIHCANFNTLFATTIPGTAFGPLCRKVFIDGVPLVTTAGYHFKQLGLVWNKDVNTHSVRLTITELLQFVTDPSLIIASSPALVDQRTICFSVAALSTGLTNQVVKPGHFNEEFYNFLRLRGFFDEGSELTLKHFFFAQNGDAAVKDFDFYRYNKPTILDICQARVTYKIVSRYFDIYEGGCIKACEVVVTNLNKSAGWPLNKFGKASLYYESISYEEQDALFALTKRNVLPTMTQLNLKYAISGKERARTVGGVSLLSTMTTRQYHQKHLKSIVNTRNATVVIGTTKFYGGWNNMLRTLIDGVENPMLMGWDYPKCDRALPNMIRMISAMVLGSKHVNCCTVTDRFYRLGNELAQVLTEVVYSNGGFYFKPGGTTSGDASTAYANSIFNIFQAVSSNINRLLSVPSDSCNNVNVRDLQRRLYDNCYRLTSVEESFIDDYYGYLRKHFSMMILSDDGVVCYNKDYAELGYIADISAFKATLYYQNNVFMSTSKCWVEEDLTKGPHEFCSQHTMQIVDKDGTYYLPYPDPSRILSAGVFVDDVVKTDAVVLLXRYVSLAIDAYPLSKHPNSEYRKVFYVLLDWVKHLNKNLNEGVLESFSVTLLDNQEDKFWCEDFYASMYENSTILQAAGLCVVCGSQTVLRCGDCLRKPMLCTKCAYDHVFGTDHKFILAITPYVCNASGCGVSDVKKLYLGGLNYYCTNHKPQLSFPLCSAGNIFGLYKNSATGSLDVEVFNRLATSDWTDVRDYKLANDVKDTLRLFAAETIKAKEESVKSSYAFATLKEVVGPKELLLSWESGKVKPPLNRNSVFTCFQISKDSKFQIGEFIFEKVEYGSDTVTYKSTVTTKLVPGMIFVLTSHNVQPLRAPTIANQEKYSSIYKLHPAFNVSDAYANLVPYYQLIGKQKITTIQGPPGSGKSHCSIGLGLYYPGARIVFVACAHAAVDSLCAKAMTVYSIDKCTRIIPARARVECYSGFKPNNTSAQYIFSTVNALPECNADIVVVDEVSMCTNYDLSVINQRLSYKHIVYVGDPQQLPAPRVMITKGVMEPVDYNVVTQRMCAIGPDVFLHKCYRCPAEIVNTVSELVYENKFVPVKPASKQCFKIFFKGNVQVDNGSSINRKQLEIVKLFLVKNPSWSKAVFISPYNSQNYVASRFLGLQIQTVDSSQGSEYDYVIYAQTSDTAHACNVNRFNVAITRAKKGIFCVMCDKTLFDSLKFFEIKHADLHSSQVCGLFKNCTRTPLNLPPTHAHTFLSLSDQFKTTGDLAVQIGSNNVCTYEHVISFMGFRFDISIPGSHSLFCTRDFAIRNVRGWLGMDVESAHVCGDNIGTNVPLQVGFSNGVNFVVQTEGCVSTNFGDVIKPVCAKSPPGEQFRHLVPFLRKGQPWLIVRRRIVQMISDYLSNLSDILVFVLWAGSLELTTMRYFVKIGPIKYCYCGNSATCYNSVSNEYCCFKHALGCDYVYNPYAFDIQQWGYVGSLSQNHHTFCNIHRNEHDASGDAVMTRCLAVHDCFVKNVDWTVTYPFIANEKFINGCGRNVQGHVVRAALKLYKPSVIHDIGNPKGVRCAVTDAKWYCYDKQPVNSNVKLLDYDYATHGQLDGLCLFWNCNVDMYPEFSIVCRFDTRTRSVFNLEGVNGGSLYVNKHAFHTPAYDKRAFVKLKPMPFFYFDDSDCDVVQEQVNYVPLRASSCVTRCNIGGAVCSKHANLYQKYVEAYNTFTQAGFNIWVPHSFDVYNLWQIFIETNLQSLENIAFNVVKKGCFTGVDGELPVAVVNDKVFVRYGDVDNLVFTNKTTLPTNVAFELFAKRKMGLTPPLSILKNLGVVATYKFVLWDYEAERPFTSYTKSVCKYTDFNEDVCVCFDNSIQGSYERFTLTTNAVLFSTVVIKNLTPIKLNFGMLNGMPVSSIKSDKGVEKLVNWYTYVRKNGQFQDHYDGFYTQGRNLSDFTPRSDMEYDFLNMDMGVFINKYGLEDFNFEHVVYGDVSKTTLGGLHLLISQFRLSKMGVLKADDFVTASDTTLRCCTVTYLNELSSKVVCTYMDLLLDDFVTILKSLDLGVISKVHEVIIDNKPYRWMLWCKDNHLSTFYPQLQSAEWKCGYAMPQIYKLQRMCLEPCNLYNYGAGIKLPSGIMLNVVKYTQLCQYLNSTTMCVPHNMRVLHYGAGSDKGVAPGTTVLKRWLPPDAIIIDNDINDYVSDADFSITGDCATVYLEDKFDLLISDMYDGRIKFCDGENVSKDGFFTYLNGVIREKLAIGGSVAIKITEYSWNKYLYELIQRFAFWTLFCTSVNTSSSEAFLIGINYLGDFIQGPFIAGNTVHANYIFWRNSTIMSLSYNSVLDLSKFECKHKATVVVTLKDSDVNDMVLSLIKSGRLLLRNSGRFGGFSNHLVSTK

SEQ ID NO: 24 - protein, 7123 aa, murine hepatitis virus
  MISC_FEATURE: ORF 1AB
MAKMGKYGLGFKWAPEFPWMLPNASEKLGSPERSEEDGFCPSAAQEPKTKGKTLINHVRVDCSRLPALECCVQSAIIRDIFVDEDPLNVEASTMMALQFGSAVLVKPSKRLSIQAWAKLGVLPKTPAMGLFKRFCLCNTRECVCDAHVAFQLFTVQPDGVCLGNGRFIGWFVPVTAIPAYAKQWLQPWSILLRKGGNKGSVTSGHFRRAVTMPVYDFNVEDACEEVHLNPKGKYSRKAYALLKGYRGVKSILFLDQYGCDYTGRLAKGLEDYGDCTLEEMKELFPVWCDSLDNEVVVAWHVDRDPRAVMRLQTLATIRSIGYVGQPTEDLVDGDVVVREPAHLLAANAIVKRLPRLVETMLYTDSSVTEFCYKTKLCDCGFITQFGYVDCCGDACDFRGWVPGNMMDGFLCPGCSKSYMPWELEAQSSGVIPKGGVLFTQSTDTVNRESFKLYGHAVVPFGSAVYWSPYPGMWLPVIWSSVKSYADLTYTGVVGCKAIVQETDAICRSLYMDYVQHKCGNLEQRAILGLDDVYHRQLLVNRGDYSLLLENVDLFVKRRAEFACKFATCGDGLVPLLLDGLVPRSYYLIKSGQAFTSMMVNFSHEVTDMCMDMALLFMHDVKVATKYVKKVTGKLAVRFKALGVAVVRKITEWFDLAVDTAASAAGWLCYQLVNGLFAVANGGITFLSDVPELVKNFVDKFKVFFKVLIDSMSVSVLSGLTVVKTASNRVCLAGCKVYEVVQKRLSAYVMPVGCNEATCLVGEIEPAVVEDDVVDVVKAPLTYQGCCKPPTSFEKICVVDKLYMAKCGDQFYPVVVDNDTIGVLDQCWRFPCAGKKVEFNDKPKVKEIPSTRKIKINFALDATFDSVLSKACSEFEVDKDVTLDELLDVVLDAVESTLSPCKEHDVIGTKVCALLNRLAEDYVYLFDEGGEEVIAPKMYCSFSAPDDEDCVAADVVDADENQGDDADDSAALVTDTQEEDGVAKGQVGVAESDARLDQVEAFDIEKVEDPILNELSAELNAPADKTYEDVLAFDAIYSEALSAFYAVPGDETHFKVCGFYSPAIERTNCWLRSTLIVMQSLPLEFKDLEMQKLWLSYKSSYNKEFVDKLVKSVPKSIILPQGGYVADFAYFFLSQCSFKAYANWRCLKCDMDLKLQGLDAMFFYGDVVSHVCKCGTGMTLLSADIPYTLHFGLRDDKFCAFYTPRKVFRAACVVDVNDCHSMAVVDGKQIDGKVVTKFNGDKYDFMVGHGMAFSMSAFEIAQLYGSCITPNVCFVKGDVIKVLRRVGAEVIVNPANGRMAHGAGVAGAIAKAAGKSFIKETADMVKNQGVCQVGECYESTGGNLCKTVLNIVGPDARGHGKQCYSFLERAYQHINKCDDVVTTLISAGIFSVPTDVSLTYLIGVVTKNVILVSNNKDDFDVIEKCQVTSIAGTKALSLQLAKNLCRDVKFETNACDSLFSDSCFVSSYDVLQEVELLRHDIQLDDDARVFVQAHMDNLPADWRLVNKFDSVDGVRTVKYFECPGEIFVSSQGKKFGYVQNGSFKVASVSQIRALLANKVDVLCTVDGVNFRSCCVAEGEVFGKTLGSVFCDGINVTKVRCSAIHKGKVFFQYSGLSAADLVAVTDAFGFDEPQLLKYYNMLGMCKWPVVVCGNYFAFKQSNNNCYINVACLMLQHLSLKFHKWQWQEAWNEFRSGKPLRFVSLVLAKGSFKFNEPSDSTDFMRVVLREADLSGATCDFEFVCKCGVKQEQRKGVDAVMHFGTLDKGDLAKGYTIACTCGNKLVHCTQLNVPFLICSNKPEGKKLPDDVVAANIFTGGSLGHYTHVKCKPKYQLYDACNVSKVSEAKGNFTDCLYLKNLKQTFSSKLTTFYLDDVKCVEYNPDLSQYYCESGKYYTKPIIKAQFRTFEKVEGVYTNFKLVGHSIAEKFNAKLGFDCNSPFTEYKITEWPTATGDVVLASDDLYVSRYSGGCVTFGKPVIWLGHEEASLKSLTYFNRPSVVCENKFNVLPVDVSEPTDKGPVPAAVLVTGALSGAATAPGTAKEQKVCASDSVVDQVVSGFLSDLSGATVDVKEVKLNGVKKPIKVEDSVVVNDPTSETKVVKSLSIVDVYDMFLTGCRYVVWMANELSRLVNSPTVREYVKWGMTKIVIPAKLVLLRDEKQEFVAPKVVKAKVIACYSAVKWFFLYCFSWIKFNTDNKVIYTTEVASKLTFNLCCLAFKNALQTFNWNVVSRGFFLVATVFLLWFNFLYANVILSDFYLPNIGFFPTFVGQIVAWVKTTFGIFTLCDLYQVSDVGYRSSFCNGSMVCELCFSGFDMLDNYDAINVVQHVVDRRVSFDYISLFKLVVELVIGYSLYTVCFYPLFGLIGMQLLTTWLPEFFMLETMHWSARFFVFVANMLPAFTLLRFYIVVTAMYKIFCLCRHVMYGCSRPGCLFCYKRNRSVRVKCSTVVGGTLRYYDVMANGGTGFCAKHQWNCLNCSAFGPGNTFITHEAAADLSKELKRPVNPTDSAYYLVTEVKQVGCSMRLFYERDGQRVYDDVSASLFVDMNGLLHSKVKGVPETHVVVVENEADKAGFLNAAVFYAQSLYRPMLLVEKKLITTANTGLSVSQTMFDLYVDSLLGVLDVDRKSLTSFVNAAHNSLKEGVQLEQVMDTFIGCARRKCAIDSDVETKSITKSIMSAVNAGVDFTDESCNNLVPTYVKSDTIVAADLGVLIQNNAKHVQANVAKAANVACIWSVDAFNQLSADLQHRLRKACSKTGLKIKLTYNKQEANVPILTTPFSLKGGAVFSKVLQWLFVVNLICFIVLWALMPTYAVHKSDMQLPLYASFKVIDNGVLRDVTVTDACFANKFIQFDQWYESTFGLVYYRNSRACPVVVAVIDQDIGYTLFNVPTKVLRYGFHVLHFITHAFATDSVQCYTPHMQIPYDNFYASGCVLSSLCTMLAHADGTPHPYCYTEGIMHNASLYDSLAPHVRYNLANSNGYIRFPEVVSEGIVRIVRTRSMTYCRVGLCEDAEEGVCFNFNSSWVLNNPYYRAMPGTFCGRNAFDLIHQVLGGLVRPIDFFALTASSVAGAILAIIVVLAFYYLIKLKRAFGDYTSVVVINVIVWCINFLMLFVFQVYPTLSCLYACFYFYTTLYFPSEISVVMHLQWLVMYGAIMPLWFCIIYVAVVVSNHALWLFSYCRKLGTEVRSDGTFEEMSLTTFMITKESYCKLKNSVSDVAFNRYLSLYNKYRYFSGKMDTAAYREAACSQLAKAMETFNHNNGNDVLYQPPTASVTTSFLQSGIVKMVFPTSKVEPCVVSVTYGNMTLNGLWLDDKVYCPRHVICSSADMTDPDYSNLLCRVISSDFCVMSGRMSLTVMSYQMQGSLLVLTVTLQNPNTPKYSFGVVKPGETFTVLAAYNGKSQGAFHVTMRSSYTIKGSFLCGSCGSVGYVLTGDSVRFVYMHQLELSTGCHTGTDFSGNFYGPYRDAQVVQLPVQDYTQTVNVVAWLYAAILNRCNWFVQSDSCSLEEFNVWAMTNGFSSIKADLVLDALASMTGVTVEQILAAIKRLYSGFQGKQILGSCVLEDELTPSDVYQQLAGVKLQSKRTRVVKGTCCWILASTLLFCSIISAFVKWTMFMYVTTHMLGVTLCALCFVSFAMLLVKHKHLYLTMFIMPVLCTLFYTNYLVVYKQSFRGLAYAWLSHFVPAVDYTYMDEVLYGVVLLVAMVFVTMRSINHDVFSVMFLVGRLVSLVSMWYFGANLEEEVLLFLTSLFGTYTWTTMLSLATAKVIAKWLAVNVLYFTDVPQVKLVLLSYLCIGYVCCCYWGVLSLLNSIFRMPLGVYNYKISVQELRYMNANGLRPPRNSFEALVLNFKLLGIGGVPVIEVSQIQSRLTDVKCVNVVLLNCLQHLHIASSSKLWQYCSTLHNEILATSDLSVAFDKLAQLLVVLFANPAAVDSKCLASIEEVSDDYVRDSTVLQALQSEFVNMASFVEYELAKKNLDEAKASGSANQQQIKQLEKACNIAKSAYERDRAVARKLERMADLALTNMYKEARINDKKSKVVSALQTMLFSMIRKLDNQALNSILDNAVKGCVPLNAIPSLTSNTLTIIVPDKQVFDQVVDNVYVTYAGNVWHIQSIQDADGAVKQLNEIDVNITWPLVIAANRHNEVSSVVLQNNELMPQKLRTQVVNSGSDMNCNTPTQCYYNTTGMGKIVYAILSDCDGLKYTKIVKEDGNCVVLELDPPCKFSVQDVKGLKIKYLYFVKGCNTLARGWVVGTLSSTVRLQAGTATEYASNSAIRSLCAFSVDPKKTYLDYIQQGGAPVTNCVKMLCDHAGTGMAITIKPEATTNQDSYGGASVCIYCRSRVEHPDVDGLCKLRGKFVQVPLGIKDPVSYVLTHDVCQVCGFWRDGMFLCRHRLPVSVKRHELFKRVRGTSVNARLVPCASGLDTDVQLRAFDICNANRAGIGLYYKVNCCRFQRADEDGNTLDKFFVIKRTNLEVYNKEKECYELTKECGVVAEHEFFTFDVEGSRVPHIVRKDLSKYTMLDLCYALRHFDRNDCSTLKEILLTYAECDESYFQKKDWYDFVENSDIINVYKKLGPIFNRALLNTAKFADTLVEAGLVGVLTLDNQDLYGQWYDFGDFVKTVPGCGVAVADSYYSYMMPMLTMCHALDSELFINGTYREFDLVQYDFTDFKLELFNKYFKYWSMTYHPNTCECEDDRCIIHCANFNILFSMVLPKTCFGPLVRQIFVDGVPFVVSIGYHYKELGVVMNMDVDTHRYRLSLKDLLLYAADPALHVASASALLDLRTCCFSVAAITSGVKFQTVKPGNFNQDFYEFILSKGLLKEGSSVDLKHFFFTQDGNAAITDYNYYKYNLPTMVDIKQLLFVLEVVNKYFEIYDGGCIPATQVIVNNYDKSAGYPFNKFGKARLYYEALSFEEQDEVYAYTKRNVLPTLTQMNLKYAISAKNRARTVAGVSILSTMTGRMFHQKCLKSIAATRGVPVVIGTTKFYGGWDDMLRRLIKDVDSPVLMGWDYPKCDRAMPNILRIISSLVLARKHDSCCSHTDRFYRLANECAQVLSEIVMCGGCYYVKPGGTSSGDATTAFANSVFNICQAVSANVCSLMACNGHKIEDLSIRELQKRLYSNVYRADHVDPAFVNEYYEFLNKHFSMMILSDDGVVCYNSEFASKGYIANISAFQQVLYYQNNVFMSEAKCWVETDIEKGPHEFCSQHTMLVKMDGDEVYLPYPDPSRILGAGCFVDDLLKTDSVLLIERFVSLAIDAYPLVYHENPEYQNVFRVYLEYIKKLYNDLGNQILDSYSVILSTCDGQKFTDETFYKNMYLRSAVMQSVGACVVCSSQTSLRCGSCIRKPLLCCKCAYDHVMSTDHKYVLSVSPYVCNSPGCDVNDVTKLYLGGMSYYCEDHKPQYSFKLVMNGMVFGLYKQSCTGSPYIEDFNKIASCKWTEVDDYVLANECTERLKLFAAETQKATEESFKQCYASATIREIVSDRELILSWEIGKVRPPLNKNYVFTGYHFTSNGKTVLGEYVFDKSELTNGVYYRATTTYKLSVGDVFILTSHAVSSLSAPTLVPQENYTSIRFASVYSVPETFQNNVPNYQHIGMKRYCTVQGPPGTGKSHLAIGLAVYYCTARVVYTAASHAAVDALCEKAYKFLNINDCTRIVPAKVRVDCYDKFKVNDTTRKYVFTTINALPELVTDIIVVDEVSMLTNYELSVINSRVRAKHYVYIGDPAQLPAPRVLLNKGTLEPRYFNSVTKLMCCLGPDIFLGTCYRCPKEIVDTVSALVYHNKLKAKNDNSSMCFKVYYKGQTTHESSSAVNMQQIYLISKFLKANPSWSNAVFISPYNSQNYVAKRVLGLQTQTVDSAQGSEYDFVIYSQTAETAHSVNVNRFNVAITRAKKGILCVMSSMQLFESLNFSTLTLDKINNPRLQCTTNLFKDCSRSYAGYHPAHAPSFLAVDDKYKVGGDLAVCLNVADSAVTYSRLISLMGFKLDLTLDGYCKLFITRDEAIRRVRAWVGFDAEGAHATRDSIGTNFPLQLGFSTGIDFVVEATGMFAERDGYVFKKAVARAPPGEQFKHLVPLMSRGQKWDVVRIRIVQMLSDHLVDLADSVVLVTWAASFELTCLRYFAKVGKEVVCSVCNKRATCFNSRTGYYGCWRHSYSCDYLYNPLIVDIQQWGYTGSLTSNHDLICSVHKGAHVASSDAIMTRCLAVHDCFCKSVNWSLEYPIISNEVSVNTSCRLLQRVMFRAAMLCNRYDVCYDIGNPKGLACVKGYDFKFYDASPVVKSVKQFVYKYEAHKDQFLDGLCMFWNCNVDKYPANAVVCRFDTRVLNKLNLPGCNGGSLYVNKHAFHTSPFTRAAFENLKPMPFFYYSDTPCVYMEGMESKQVDYVPLRSATCITRCNLGGAVCLKHAEDYREYLESYNTATTAGFTFWVYKTFDFYNLWNTFTRLQSLENVVYNLVNAGHFDGRAGELPCAVIGEKVIAKIQNEDVVVFKNNTPFPTNVAVELFAKRSIRPHPELKLFRNLNIDVCWSHVLWDYAKDSVFCSSTYKVCKYTDLQCIESLNVLFDGRDNGALEAFKKCRDGVYINTTKIKSLSMIKGPQRADLNGVVVEKVGDSDVEFWFAMRRDGDDVIFSRTGSLEPSHYRSPQGNPGGNRVGDLSGNEALARGTIFTQSRFLSSFAPRSEMEKDFMDLDEDVFIAKYSLQDYAFEHVVYGSFNQKIIGGLHLLIGLARRQQKSNLVIQEFVPYDSSIHSYFITDENSGSSKSVCTVIDLLLDDFVDIVKSLNLNCVSKVVNVNVDFKDFQFMLWCNEEKVMTFYPRLQAAADWKPGYVMPVLYKYLESPLERVNLWNYGKPITLPTGCLMNVAKYTQLCQYLNTTTLAVPANMRVLHLGAGSDKDVAPGSAVLRQWLPAGSILVDNDINPFVSDSVASYYGNCITLPIACQWDLIISDMYDPLTKNIGEYNVSKDGFFTYLCHLIRDKLALGGSVAIKITEFSWNAELYSLMGKFAFWTIFCTNVNASSSEGFLIGINWLNRTRTEIDGKTMHANYLFWRNSTMWNGGAYSLFDMSKFPLKVAGTAVVSLKPDQINDLVLSLIEKGKLLVRDTRKEVFVGDSLVNVK

SEQ ID NO: 25 - protein, 7095 aa, human coronavirus OC43
  MISC_FEATURE: ORF 1AB
MSKINKYGLELHWAPEFPWMFEDAEEKLDNPSSSEVDMICSTTAQKLETDGICPENHVMVDCRRLLKQECCVQSSLIREIVMNASPYDLEVLLQDALQSREAVLVTTPLGMSLEACYVRGCNPKGWTMGLFRRRSVCNTGRCTVNKHVAYQLYMIDPAGVCLGAGQFVGWVIPLAFMPVQSRKFIVPWVMYLRKRGEKGAYNKDHGRGGFGHVYDFKVEDAYDQVHDEPKGKFSKKAYALIRGYRGVKPLLYVDQYGCDYTGSLADGLEAYADKTLQEMKALFPTWSQELLFDVIVAWHVVRDPRYVMRLQSAATIRSVAYVANPTEDLCDGSVVIKEPVHVYADDSIILRQYNLVDIMSHFYMEADTVVNAFYGVALKDCGFVMQFGYIDCEQDSCDFKGWIPGNMIDGFACTTCGHVYEVGDLIAQSSGVLPVNPVLHTKSAAGYGGFGCKDSFTLYGQTVVYFGGCVYWSPARNIWIPILKSSVKSYDSLVYTGVLGCKAIVKETNLICKALYLDYVQHKCGNLHQRELLGVSDVWHKQLLLNRGVYKPLLENIDYFNMRRAKFSLETFTVCADGFMPFLLDDLVPRAYYLAVSGQAFCDYADKLCHAVVSKSKELLDVSLDSLGAAIHYLNSKIVDLAQHFSDFGTSFVSKIVHFFKTFTTSTALAFAWVLFHVLHGAYIVVESDIYFVKNIPRYASAVAQAFQSVAKVVLDSLRVTFIDGLSCFKIGRRRICLSGRKIYEVERGLLHSSQLPLDVYDLTMPSQVQKAKQKPIYLKGSGSDFSLADSVVEVVTTSLTPCGYSEPPKVADKICIVDNVYMAKAGDKYYPVVVDDHVGLLDQAWRVPCAGRRVTFKEQPTVKEIISMPKIIKVFYELDNDFNTILNTACGVFEVDDTVDMEEFYAVVIDAIEEKLSPCKELEGVGAKVSAFLQKLEDNPLFLFDEAGEEVLAPKLYCAFTAPEDDDFLEESDVEEDDVEGEETDLTVTSAGQPCVASEQEESSEVLEDTLDDGPSVETSDSQVEEDVEMSDFVDLESVIQDYENVCFEFYTTEPEFVKVLGLYVPKATRNNCWLRSVLAVMQKLPCQFKDKNLQDLWVLYKQQYSQLFVDTLVNKIPANIVLPQGGYVADFAYWFLTLCDWQCVAYWKCIKCDLALKLKGLDAMFFYGDVVSHICKCGESMVLIDVDVPFTAHFALKDKLFCAFITKRIVYKAACVVDVNDSHSMAVVDGKQIDDHRITSITSDKFDFIIGHGMSFSMTTFEIAQLYGSCITPNVCFVKGDIIKVSKLVKAEVVVNPANGHMAHGGGVAKAIAVAAGQQFVKETTDMVKSKGVCATGDCYVSTGGKLCKTVLNVVGPDARTQGKQSYVLLERVYKHLNNYDCVVTTLISAGIFSVPSDVSLTYLLGTAKKQVVLVSNNQEDFDLISKCQITAVEGTKKLAARLSFNVGRSIVYETDANKLILINDVAFVSTFNVLQDVLSLRHDIALDDDARTFVQSNVDVVPEGWRVVNKFYQINGVRTVKYFECTGGIDICSQDKVFGYVQQGIFNKATVAQIKALFLDKVDILLTVDGVNFTNRFVPVGESFGKSLGNVFCDGVNVTKHKCDINYKGKVFFQFDNLSSEDLKAVRSSFNFDQKELLAYYNMLVNCFKWQVVVNGKYFTFKQANNNCFVNVSCLMLQSLHLTFKIVQWQEAWLEFRSGRPARFVALVLAKGGFKFGDPADSRDFLRVVFSQVDLTGAICDFEIACKCGVKQEQRTGLDAVMHFGTLSREDLEIGYTVDCSCGKKLIHCVRFDVPFLICSNTPASVKLPKGVGSANIFIGDKVGHYVHVKCEQSYQLYDASNVKKVTDVTGKLSDCLYLKNLKQTFKSVLTTYYLDDVKKIEYKPDLSQYYCDGGKYYTQRIIKAQFKTFEKVDGVYTNFKLIGHTVCDSLNAKLGFDSSKEFVEYKITEWPTATGDVVLATDDLYVKRYERGCITFGKPVIWLSHEKASLNSLTYFNRPSLVDDNKFDVLKVDDVDDGGDSSESGAKETKEINIIKLSGVKKPFKVEDSVIVNDDTSETKYVKSLSIVDVYDMWLTGCKYVVRTANALSRAVNVPTIRKFIKFGMTLVSIPIDLLNLREIKPAVNVVKAVRNKISVCFNFIKWLFVLLFGWIKISADNKVIYTTEIASKLTCKLVALAFKNAFLTFKWSMVARGACIIATIFLLWFNFIYANVIFSDFYLPKIGFLPTFVGKIAQWIKNTFSLVTICDLYSMQDVGFKNQYCNGSIACQFCLAGFDMLDNYKAIDVVQYEADRRAFVDYTGVLKIVIELIVSYALYTAWFYPLFALISIQILTTWLPELFMLSTLHWSFRLLVALANMLPAHVFMRFYIIIASFIKLFSLFRHVAYGCSKSGCLFCYKRNRSLRVKCSTIVGGMIRYYDVMANGGTGFCSKHQWNCIDCDSYKPGNTFITVEAALDLSKELKRPIQPTDVAYHTVTDVKQVGCSMRLFYDRDGQRTYDDVNASLFVDYSNLLHSKVKSVPNMHVVVVENDADKANFLNAAVFYAQSLFRPILMVDKNLITTANTGTSVTETMFDVYVDTFLSMFDVDKKSLNALIATAHSSIKQGTQIYKVLDTFLSCARKSCSIDSDVDTKCLADSVMSAVSAGLELTDESCNNLVPTYLKSDNIVAADLGVLIQNSAKHVQGNVAKIAGVSCIWSVDAFNQFSSDFQHKLKKACCKTGLKLKLTYNKQMANVSVLTTPFSLKGGAVFSYFVYVCFVLSLVCFIGLWCLMPTYTVHKSDFQLPVYASYKVLDNGVIRDVSVEDVCFANKFEQFDQWYESTFGLSYYSNSMACPIVVAVIDQDFGSTVFNVPTKVLRYGYHVLHFITHALSADGVQCYTPHSQISYSNFYASGCVLSSACTMFTMADGSPQPYCYTEGLMQNASLYSSLVPHVRYNLANAKGFIRFPEVLREGLVRIVRTRSMSYCRVGLCEEADEGICFNFNGSWVLNNDYYRSLPGTFCGRDVFDLIYQLFKGLAQPVDFLALTASSIAGAILAVIVVLVFYYLIKLKRAFGDYTSVVFVNVIVWCVNFMMLFVFQVYPILSCVYAICYFYATLYFPSEISVIMHLQWLVMYGTIMPLWFCLLYIAVVVSNHAFWVFSYCRKLGTSVRSDGTFEEMALTTFMITKDSYCKLKNSLSDVAFNRYLSLYNKYRYYSGKMDTAAYREAACSQLAKAMDTFTNNNGSDVLYQPPTASVSTSFLQSGIVKMVNPTSKVEPCVVSVTYGNMTLNGLWLDDKVYCPRHVICSASDMTNPDYTNLLCRVTSSDFTVLFDRLSLTVMSYQMRGCMLVLTVTLQNSRTPKYTFGVVKPGETFTVLAAYNGKPQGAFHVTMRSSYTIKGSFLCGSCGSVGYVIMGDCVKFVYMHQLELSTGCHTGTDFNGDFYGPYKDAQVVQLLIQDYIQSVNFVAWLYAAILNNCNWFVQSDKCSVEDFNVWALSNGFSQVKSDLVIDALASMTGVSLETLLAAIKRLKNGFQGRQIMGSCSFEDELTPSDVYQQLAGIKLQSKRTRLFKGTVCWIMASTFLFSCIITAFVKWTMFMYVTTNMFSITFCALCVISLAMLLVKHKHLYLTMYITPVLFTLLYNNYLVVYKHTFRGYVYAWLSYYVPSVEYTYTDEVIYGMLLLVGMVFVTLRSINHDLFSFIMFVGRLISVFSLWYKGSNLEEEILLMLASLFGTYTWTTVLSMAVAKVIAKWVAVNVLYFTDIPQIKIVLLCYLFIGYIISCYWGLFSLMNSLFRMPLGVYNYKISVQELRYMNANGLRPPKNSFEALMLNFKLLGIGGVPIIEVSQFQSKLTDVKCANVVLLNCLQHLHVASNSKLWHYCSTLHNEILATSDLSVAFEKLAQLLIVLFANPAAVDSKCLTSIEEVCDDYAKDNTVLQALQSEFVNMASFVEYEVAKKNLDEARFSGSANQQQLKQLEKACNIAKSAYERDRAVAKKLERMADLALTNMYKEARINDKKSKVVSALQTMLFSMVRKLDNQALNSILDNAVKGCVPLNAIPSLAANTLNIIVPDKSVYDQVVDNVYVTYAGNVWQIQTIQDSDGTNKQLNEISDDCNWPLVIIANRYNEVSATVLQNNELMPAKLKIQVVNSGPDQTCNTPTQCYYNNSNNGKIVYAILSDVDGLKYTKILKDDGNFVVLELDPPCKFTVQDAKGLKIKYLYFVKGCNTLARGWVVGTISSTVRLQAGTATEYASNSSILSLCAFSVDPKKTYLDFIQQGGTPIANCVKMLCDHAGTGMAITVKPDATTSQDSYGGASVCIYCRARVEHPDVDGLCKLRGKFVQVPVGIKDPVSYVLTHDVCRVCGFWRDGSCSCVSTDTTVQSKDTNFFKRVRGTSVDARLVPCASGLSTDVQLRAFDIYNASVAGIGLHLKVNCCRFQRVDENGDKLDQFFVVKRTDLTIYNREMKCYERVKDCKFVAEHDFFTFDVEGSRVPHIVRKDLTKYTMLDLCYALRHFDRNDCMLLCDILSIYAGCEQSYFTKKDWYDFVENPDIINVYKKLGPIFNRALVSATEFADKLVEVGLVGVLTLDNQDLNGKWYDFGDYVIAAPGCGVAIADSYYSYIMPMLTMCHALDCELYVNNAYRLFDLVQYDFTDYKLELFNKYFKHWSMPYHPNTVDCQDDRCIIHCANFNILFSMVLPNTCFGPLVRQIFVDGVPFVVSIGYHYKELGIVMNMDVDTHRYRLSLKDLLLYAADPALHVASASALYDLRTCCFSVAAITSGVKFQTVKPGNFNQDFYDFVLSKGLLKEGSSVDLKHFFFTQDGNAAITDYNYYKYNLPTMVDIKQLLFVLEVVYKYFEIYDGGCIPASQVIVNNYDKSAGYPFNKFGKARLYYEALSFEEQDEIYAYTKRNVLPTLTQMNLKYAISAKNRARTVAGVSILSTMTGRMFHQKCLKSIAATRGVPVVIGTTKFYGGWDDMLRRLIKDVDNPVLMGWDYPKCDRAMPNLLRIVSSLVLARKHETCCSQSDRFYRLANECAQVLSEIVMCGGCYYVKPGGTSSGDATTAFANSVFNICQAVSANVCALMSCNGNKIEDLSIRALQKRLYSHVYRSDKVDSTFVTEYYEFLNKHFSMMILSDDGVVCYNSDYASKGYIANISAFQQVLYYQNNVFMSESKCWVEHDINNGPHEFCSQHTMLVKMDGDDVYLPYPNPSRILGAGCFVDDLLKTDSVLLIERFVSLAIDAYPLVYHENEEYQKVFRVYLAYIKKLYNDLGNQILDSYSVILSTCDGQKFTDESFYKNMYLRSAVMQSVGACVVCSSQTSLRCGSCIRKPLLCCKCCYDHVMATDHKYVLSVSPYVCNAPGCDVNDVTKLYLGGMSYYCEDHKPQYSFKLVMNGLVFGLYKQSCTGSPYIDDFNRIASCKWTDVDDYILANECTERLKLFAAETQKATEEAFKQSYASATIQEIVSERELILSWEIGKVKPPLNKNYVFTGYHFTKNGKTVLGEYVFDKSELTNGVYYRATTTYKLSVGDVFVLTSHSVANLSAPTLVPQENYSSIRFASVYSVLETFQNNVVNYQHIGMKRYCTVQGPPGTGKSHLAIGLAVFYCTARVVYTAASHAAVDALCEKAYKFLNINDCTRIVPAKVRVECYDKFKINDTTRKYVFTTINALPEMVTDIVVVDEVSMLTNYELSVINARIRAKHYVYIGDPAQLPAPRVLLSKGTLEPKYFNTVTKLMCCLGPDIFLGTCYRCPKEIVDTVSALVYENKLKAKNESSSLCFKVYYKGVTTHESSSAVNMQQIYLINKFLKANPLWHKAVFISPYNSQNFAAKRVLGLQTQTVDSAQGSEYDYVIYSQTAETAHSVNVNRFNVAITRAKKGILCVMSNMQLFEALQFTTLTLDKVPQAVETKVQCSTNLFKDCSKSYSGYHPAHAPSFLAVDDKYKATGDLAVCLGIGDSAVTYSRLISLMGFKLDVTLDGYCKLFITKEEAVKRVRAWVGFDAEGAHATRDSIGTNFPLQLGFSTGIDFVVEATGLFADRDGYSFKKAVAKAPPGEQFKHLIPLMTRGHRWDVVRPRIVQMFADHLIDLSDCVVLVTWAANFELTCLRYFAKVGREISCNVCTKRATVYNSRTGYYGCWRHSVTCDYLYNPLIVDIQQWGYIGSLSSNHDLYCSVHKGAHVASSDAIMTRCLAVYDCFCNNINWNVEYPIISNELSINTSCRVLQRVILKAAMLCNRYTLCYDIGNPKAIACVKDFDFKFYDAQPIVKSVKTLLYSFEAHKDSFKDGLCMFWNCNVDKYPPNAVVCRFDTRVLNNLNLPGCNGGSLYVNKHAFHTKPFARAAFEHLKPMPFFYYSDTPCVYMDGMDAKQVDYVPLKSATCITRCNLGGAVCLKHAEEYREYLESYNTATTAGFTFWVYKTFDFYNLWNTFTKLQSLENVVYNLVKTGHYTGQAGEMPCAIINDKVVAKIDKEDVVIFINNTTYPTNVAVELFAKRSVRHHPELKLFRNLNIDVCWKHVIWDYARESIFCSNTYGVCMYTDLKFIDKLNVLFDGRDNGALEAFKRSNNGVYISTTKVKSLSMIRGPPRAELNGVVVDKVGDTDCVFYFAVRKEGQDVIFSQFDSLGVSSNQSPQGNLGSNGKPGNVGGNDALSISTIFTQSRVISSFTCRTDMEKDFIALDQDVFIQKYGLEDYAFEHIVYGNFNQKIIGGLHLLIGLYRRQQTSNLVVQEFVSYDSSIHSYFITDEKSGGSKSVCTVIDILLDDFVALVKSLNLNCVSKVVNVNVDFKDFQFMLWCNDEKVMTFYPRLQAASDWKPGYSMPVLYKYLNSPMERVSLWNYGKPVTLPTGCMMNVAKYTQLCQYLNTTTLAVPVNMRVLHLGAGSEKGVAPGSAVLRQWLPAGTILVDNDLYPFVSDSVATYFGDCITLPFDCQWDLIISDMYDPITKNIGEYNVSKDGFFTYICHMIRDKLALGGSVAIKITEFSWNAELYKLMGYFAFWTVFCTNANASSSEGFLIGINYLCKPKVEIDGNVMHANYLFWRNSTVWNGGAYSLFDMAKFPLKLAGTAVINLRADQINDMVYSLLEKGKLLIRDTNKEVFVGDSLVNVI

SEQ ID NO: 26 - protein, 6781 aa, porcine epidemic diarhhea virus
  MISC_FEATURE: ORF 1AB
MASNHVTLAFANDAEISAFGFCTASEAVSYYSEAAASGFMQCRFVSLDLADTVEGLLPEDYVMVVIGTTKLSAYVDTFGSRPRNICGWLLFSNCNYFLEELELTFGRRGGNIVPVDQYMCGADGKPVLQESEWEYTDFFADSEDGQLNIAGITYVKAWIVERSDVSYASQNLTSIKSITYCSTYEHTFLDGTAMKVARTPKIKKNVVLSEPLATIYREIGSPFVDNGSDARSIIRRPVFLHAFVKCKCGSYHWTVGDWTSYVSTCCGFKCKPVLVASCSAMPGSVVVTRAGAGTGVKYYNNMFLRHVADIDGLAFWRILKVQSKDDLACSGKFLEHHEEGFTDPCYFLNDSSLATKLKFDILSGKFSDEVKQAIIAGHVVVGSALVDIVDDALGQPWFIRKLGDLASAPWEQLKAVVRGLGLLSDEVVLFGKRLSCATLSIVNGVFEFLADVPEKLAAAVTVFVNFLNEFFESACDCLKVGGKTFNKVGSYVLFDNALVKLVKAKARGPRQAGICEVRYTSLVVGSTTKVVSKRVENANVNLVVVDEDVTLNTTGRTVVVDGLAFFESDGFYRHLADADVVIEHPVYKSACELKPVFECDPIPDFPLPVAASVAELCVQTDLLLKNYNTPYKTYSCVVRGDKCCITCTLQFKAPSYVEDAVNFVDLCTKNIGTAGFHEFYITAHEQQDLQGFLTTCCTMSGFECFMPTIPQCPAVLEEIDGGSIWRSFITGLNTMWDFCKRLKVSFGLDGIVVTVARKFKRLGALLAEMYNTYLSTVVENLVLAGVSFKYYATSVPKIVLGGCFHSVKSVFASVFQIPVQAGIEKFKVFLNCVHPVVPRVIETSFVELEETTFKPPALNGGIAIVDGFAFYYDGTLYYPTDGNSVVPICFKKKGGGDVKFSDEVSVKTIDPVYKVSLEFEFESETIMAVLNKAVGNRIKVTGGWDDVVEYINVAIEVLKDHVEVPKYYIYDEEGGTDPNLPVMVSQWPLNDDTISQDLLDVEVVTDAPIDSEGDEVDSSAPEKVADVANSEPGDDGLPVAPETNVESEVEEVAATLSFIKDTPSTVTKDPFAFDFVSYGGLKVLRQSHNNCWVTSTLVQLQLLGIVDDPAMELFSAGRVGPMVRKCYESQKAILGSLGDVSACLESLTKDLHTLKITCSVVCGCGTGERIYEGCAFRMTPTLEPFPYGACAQCAQVLMHTFKSIVGTGIFCRDTTALSLDSLVVKPLCAAAFIGKDSGHYVTNFYDAAMAIDGYGRHQIKYDTLNTICVKDVNWTAPLVPAVDSVVEPVVKPFYSYKNVDFYQGDFSDLVKLPCDFVVNAANEKLSHGGGIAKAIDVYTKGMLQKCSNDYIKAHGPIKVGRGVMLEALGLKVFNVVGPRKGKHAPELLVKAYKSVFANSGVALTPLISVGIFSVPLEESLSAFLACVGDRHCKCFCYGDKEREAIIKYMDGLVDAIFKEALVDTTPVQEDVQQVSQKPVLPNFEPFRIEGAHAFYECNPEGLMSLGADKLVLFTNSNLDFCSVGKCLNDVTSGALLEAINVFKKSNKTVPAGNCVTLDCANMISITMVVLPFDGDANYDKNYARAVVKVSKLKGKLVLAVDDATLYSKLSHLSVLGFVSTPDDVERFYANKSVVIKVTEDTRSVKAVKVESTATYGQQIGPCLVNDTVVTDNKPVVADVVAKVVPNANWDSHYGFDKAGEFHMLDHTGFTFPSEVVNGRRVIKTTDNNCWVNVTCLQLQFARFRFKSAGLQAMWESYCTGDVAMFVHWLYWLTGVDKGQPSDSENALNMLSKYIVPAGSVTIERVTHDGCCCSKRVVTAPVVNASVLKLGVEDGLCPHGLNYIGKVVVVKGTTIVVNVGKPVVAPSHLFLKGVSYTTFLDNGNGVVGHYTVFDHGTGMVHDGDAFVPGDLNVSPVTNVVVSEQTAVVIKDPVKKAELDATKLLDTMNYASERFFSFGDFMSRNLITVFLYILSILGLCFRAFRKRDVKVLAGVPQRTGIILRKSMRYNAKALGVFFKLKLYWFKVLGKFSLGIYALYALLFMTIRFTPIGSPVCDDVVAGYANSSFDKNEYCNSVICKVCLYGYQELSDFSHTQVVWQHLRDPLIGNVMPFFYLAFLAIFGGVYVKAITLYFIFQYLNSLGVFLGLQQSIWFLQLVPFDVFGDEIVVFFIVTRVLMFIKHVCLGCDKASCVACSKSARLKRVPVQTIFQGTSKSFYVHANGGSKFCKKHNFFCLNCDSYGPGCTFINDVIATEVGNVVKLNVQPTGPATILIDKVEFSNGFYYLYSGDTFWKYNFDITDSKYTCKEALKNCSIITDFIVFNNNGSNVNQVKNACVYFSQMLCKPVKLVDSALLASLSVDFGASLHSAFVSVLSNSFGKDLSSCNDMQDCKSTLGFDDVPLDTFNAAVAEAHRYDVLLTDMSFNNFTTSYAKPEEKFPVHDIATCMRVGAKIVNHNVLVKDSIPVVWLVRDFIALSEETRKYIIRTTKVKGITFMLTFNDCRMHTTIPTVCIANKKGAGLPSFSKVKKFFWFLCLFIVAAFFALSFLDFSTQVSSDSDYDFKYIESGQLKTFDNPLSCVHNVFINFDQWHDAKFGFTPVNNPSCPIVVGVSDEARTVPGIPAGVYLAGKTLVFAINTIFGTSGLCFDASGVADKGACIFNSACTTLSGLGGTAVYCYKNGLVEGAKLYSELAPHSYYKMVDGNAVSLPEIISRGFGIRTIRTKAMTYCRVGQCVQSAEGVCFGADRFFVYNAESGSDFVCGTGLFTLLMNVISVFSKTVPVTVLSGQILFNCIIAFVAVAVCFLFTKFKRMFGDMSVGVFTVGACTLLNNVSYIVTQNTLGMLGYATLYFLCTKGVRYMWIWHLGFLISYILIAPWWVLMVYAFSAIFEFMPNLFKLKVSTQLFEGDKFVGSFENAAAGTFVLDMHAYERLANSISTEKLRQYASTYNKYKYYSGSASEADYRLACFAHLAKAMMDYASNHNDTLYTPPTVSYNSTLQAGLRKMAQPSGVVEKCIVRVCYGNMALNGLWLGDIVMCPRHVIASSTTSTIDYDYALSVLRLHNFSISSGNVFLGVVSATMRGALLQIKVNQNNVHTPKYTYRTVRPGESFNILACYDGAAAGVYGVNMRSNYTIRGSFINGACGSPGYNINNGTVEFCYLHQLELGSGCHVGSDLDGVMYGGYEDQPTLQVEGASSLFTENVLAFLYAALINGSTWWLSSSRIAVDRFNEWAVHNGMTTVGNTDCFSILAAKTGVDVQRLLASIQSLHKNFGGKQILGHTSLTDEFTTGEVVRQMYGVNLQGGYVSRACRNVLLVGSFLTFFWSELVSYTKFFWVNPGYVTPMFACLSLLSSLLMFTLKHKTLFFQVFLIPALIVTSCINLAFDVEVYNYLAEHFDYHVSLMGFNAQGLVNIFVCFVVTILHGTYTWRFFNTPASSVTYVVALLTAAYNYFYASDILSCAMTLFASVTGNWFVGAVCYKVAVYMALRFPTFVAIFGDIKSVMFCYLVLGYFTCCFYGILYWFNRFFKVSVGVYDYTVSAAEFKYMVANGLRAPTGTLDSLLLSAKLIGIGGERNIKISSVQSKLTDIKCSNVVLLGCLSSMNVSANSTEWAYCVDLHNKINLCNDPEKAQEMLLALLAFFLSKNSAFGLDDLLESYFNDNSMLQSVASTYVGLPSYVIYENARQQYEDAVNNGSPPQLVKQLRHAMNVAKSEFDREASTQRKLDRMAEQAAAQMYKEARAVNRKSKVVSAMHSLLFGMLRRLDMSSVDTILNLAKDGVVPLSVIPAVSATKLNIVTSDIDSYNRIQREGCVHYAGTIWNIIDIKDNDGKVVHVKEVTAQNAESLSWPLVLGCERIVKLQNNEIIPGKLKQRSIKAEGDGIVGEGKALYNNEGGRTFMYAFISDKPDLRVVKWEFDGGCNTIELEPPRKFLVDSPNGAQIKYLYFVRNLNTLRRGAVLGYIGATVRLQAGKQTEQAINSSLLTLCAFAVDPAKTYIDAVKSGHKPVGNCVKMLANGSGNGQAVTNGVEASTNQDSYGGASVCLYCRAHVEHPSMDGFCRLKGKYVQVPLGTVDPIRFVLENDVCKVCGCWLSNGCTCDRSIMQSTDYGLFKRVRGSSAARLEPCNGTDTQHVYRAFDIYNKDVACLGKFLKVNCVRLKNLDKHDAFYVVKRCTKSAMEHEQSIYSRLEKCGAIAEHDFFTWKDGRAIYGNVCRKDLTEYTMMDLCYALRNFDENNCDVLKSILIKVGACEESYFNNKVWFDPVENEDIHRVYALLGTIVARAMLKCVKFCDAMVEQGIVGVVTLDNQDLNGDFYDFGDFTCSIKGMGVPICTSYYSYMMPVMGMTNCLASECFVKSDIFGEDFKSYDLLEYDFTEHKTALFNKYFKYWGLQYHPNCVDCSDEQCIVHCANFNTLFSTTIPITAFGPLCRKCWIDGVPLVTTAGYHFKQLGIVWNNDLNLHSSRLSINELLQFCSDPALLIASSPALVDQRTVCFSVAALGTGMTNQTVKPGHFNKEFYDFLLEQGFFSEGSELTLKHFFFAQKVDAAVKDFDYYRYNRPTVLDICQARVVYQIVQRYFDIYEGGCITAKEVVVTNLNKSAGYPLNKFGKAGLYYESLSYEEQDELYAYTKRNILPTMTQLNLKYAISGKERARTVGGVSLLSTMTTRQYHQKHLKSIVNTRGASVVIGTTKFYGGWDNMLKNLIDGVENPCLMGWDYPKCDRALPNMIRMISAMILGSKHTTCCSSTDRFFRLCNELAQVLTEVVYSNGGFYLKPGGTTSGDATTAYANSVFNIFQAVSANVNKLLSVDSNVCHNLEVKQLQRKLYECCYRSTIVDDQFVVEYYGYLRKHFSMMILSDDGVVCYNNDYASLGYVADLNAFKAVLYYQNNVFMSASKCWIEPDINKGPHEFCSQHTMQIVDKEGTYYLPYPDPSRILSAGVFVDDVVKTDAVVLLERYVSLAIDAYPLSKHENPEYKKVFYVLLDWVKHLYKTLNAGVLESFSVTLLEDSTAKFWDESFYANMYEKSAVLQSAGLCVVCGSQTVLRCGDCLRRPMLCTKCAYDHVIGTTHKFILAITPYVCCASDCGVNDVTKLYLGGLSYWCHEHKPRLAFPLCSAGNVFGLYKNSATGSPDVEDFNRIATSDWTDVSDYRLANDVKDSLRLFAAETIKAKEESVKSSYACATLHEVVGPKELLLKWEVGRPKPPLNRNSVFTCYHITKNTKFQIGEFVFEKAEYDNDAVTYKTTATTKLVPGMVFVLTSHNVQPLRAPTIANQERYSTIHKLHPAFNIPEAYSSLVPYYQLIGKQKITTIQGPPGSGKSHCVIGLGLYYPGARIVFTACSHAAVDSLCVKASTAYSNDKCSRIIPQRARVECYDGFKSNNTSAQYLFSTVNALPECNADIVVVDEVSMCTNYDLSVINQRISYRHVVYVGDPQQLPAPRVMISRGTLEPKDYNVVTQRMCALKPDVFLHKCYRCPAEIVRTVSEMVYENQFIPVHPDSKQCFKIFCKGNVQVDNGSSINRRQLDVVRMFLAKNPRWSKAVFISPYNSQNYVASRLLGLQIQTVDSSQGSEYDYVIYAQTSDTAHASNVNRFNVAITRAKKGILCIMCDRSLFDLLKFFELKLSDLQANEGCGLFKDCSRGDDLLPPSHANTFMSLADNFKTDQYLAVQIGVNGPIKYEHVISFMGFRFDINIPNHHTLFCTRDFAMRNVRGWLGFDVEGAHVVGSNVGTNVPLQLGFSNGVDFVVRPEGCVVTESGDYIKPVRARAPPGEQFAHLLPLLKRGQPWDVVRKRIVQMCSDYLANLSDILIFVLWAGGLELTTMRYFVKIGPSKSCDCGKVATCYNSALHTYCCFKHALGCDYLYNPYCIDIQQWGYKGSLSLNHHEHCNVHRNEHVASGDAIMTRCLAIHDCFVKNVDWSITYPFIGNEAVINKSGRIVQSHTMRSVLKLYNPKAIYDIGNPKGIRCAVTDAKWFCFDKNPTNSNVKTLEYDYITHGQFDGLCLFWNCNVDMYPEFSVVCRFDTRCRSPLNLEGCNGGSLYVNNHAFHTPAFDKRAFAKLKPMPFFFYDDTECDKLQDSINYVPLRASNCITKCNVGGAVCSKHCAMYHSYVNAYNTFTSAGFTIWVPTSFDTYNLWQTFSNNLQGLENIAFNVLKKGSFVGDEGELPVAVVNDKVLVRDGTVDTLVFTNKTSLPTNVAFELYAKRKVGLTPPITILRNLGVVCTSKCVIWDYEAERPLTTFTKDVCKYTDFEGDVCTLFDNSIVGSLERFSMTQNAVLMSLTAVKKLTGIKLTYGYLNGVPVNTHEDKPFTWYIYTRKNGKFEDYPDGYFTQGRTTADFSPRSDMEKDFLSMDMGLFINKYGLEDYGFEHVVYGDVSKTTLGGLHLLISQVRLACMGVLKIDEFVSSNDSTLKSCTVTYADNPSSKMVCTYMDLLLDDFVSILKSLDLSVVSKVHEVMVDCKMWRWMLWCKDHKLQTFYPQLQASEWKCGYSMPSIYKIQRMCLEPCNLYNYGAGVKLPDGIMFNVVKYTQLCQYLNSTTMCVPHHMRVLHLGAGSDKGVAPGTAVLRRWLPLDAIIVDNDSVDYVSDADYSVTGDCSTLYLSDKFDLVISDMYDGKIKSCDGENVSKEGFFPYINGVITEKLALGGTVAIKVTEFSWNKKLYELIQKFEYWTMFCTSVNTSSSEAFLIGVHYLGDFASGAVIDGNTMHANYIFWRNSTIMTMSYNSVLDLSKFNCKHKATVVVNLKDSSISDVVLGLLKNGKLLVRNNDAICGFSNHLVNVNK

SEQ ID NO: 27 - protein, 7073 aa, human SARS virus
  MISC_FEATURE: ORF 1AB
MESLVLGVNEKTHVQLSLPVLQVRDVLVRGFGDSVEEALSEAREHLKNGTCGLVELEKGVLPQLEQPYVFIKRSDALSTNHGHKVVELVAEMDGIQYGRSGITLGVLVPHVGETPIAYRNVLLRKNGNKGAGGHSYGIDLKSYDLGDELGTDPIEDYEQNWNTKHGSGALRELTRELNGGAVTRYVDNNFCGPDGYPLDCIKDFLARAGKSMCTLSEQLDYIESKRGVYCCRDHEHEIAWFTERSDKSYEHQTPFEIKSAKKFDTFKGECPKFVFPLNSKVKVIQPRVEKKKTEGFMGRIRSVYPVASPQECNNMHLSTLMKCNHCDEVSWQTCDFLKATCEHCGTENLVIEGPTTCGYLPTNAVVKMPCPACQDPEIGPEHSVADYHNHSNIETRLRKGGRTRCFGGCVFAYVGCYNKRAYWVPRASADIGSGHTGITGDNVETLNEDLLEILSRERVNINIVGDFHLNEEVAIILASFSASTSAFIDTIKSLDYKSFKTIVESCGNYKVTKGKPVKGAWNIGQQRSVLTPLCGFPSQAAGVIRSIFARTLDAANHSIPDLQRAAVTILDGISEQSLRLVDAMVYTSDLLTNSVIIMAYVTGGLVQQTSQWLSNLLGTTVEKLRPIFEWIEAKLSAGVEFLKDAWEILKFLITGVFDIVKGQIQVASDNIKDCVKCFIDVVNKALEMCIDQVTIAGAKLRSLNLGEVFIAQSKGLYRQCIRGKEQLQLLMPLKAPKEVTFLEGDSHDTVLTSEEVVLKNGELEALETPVDSFTNGAIVGTPVCVNGLMLLEIKDKEQYCALSPGLLATNNVFRLKGGAPIKGVTFGEDTVWEVQGYKNVRITFELDERVDKVLNEKCSVYTVESGTEVTEFACVVAEAVVKTLQPVSDLLTNMGIDLDEWSVATFYLFDDAGEENFSSRMYCSFYPPDEEEEDDAECEEEEIDETCEHEYGTEDDYQGLPLEFGASAETVRVEEEEEEDWLDDTTEQSEIEPEPEPTPEEPVNQFTGYLKLTDNVAIKCVDIVKEAQSANPMVIVNAANIHLKHGGGVAGALNKATNGAMQKESDDYIKLNGPLTVGGSCLLSGHNLAKKCLHVVGPNLNAGEDIQLLKAAYENFNSQDILLAPLLSAGIFGAKPLQSLQVCVQTVRTQVYIAVNDKALYEQVVMDYLDNLKPRVEAPKQEEPPNTEDSKTEEKSVVQKPVDVKPKIKACIDEVTTTLEETKFLTNKLLLFADINGKLYHDSQNMLRGEDMSFLEKDAPYMVGDVITSGDITCVVIPSKKAGGTTEMLSRALKKVPVDEYITTYPGQGCAGYTLEEAKTALKKCKSAFYVLPSEAPNAKEEILGTVSWNLREMLAHAEETRKLMPICMDVRAIMATIQRKYKGIKIQEGIVDYGVRFFFYTSKEPVASIITKLNSLNEPLVTMPIGYVTHGFNLEEAARCMRSLKAPAVVSVSSPDAVTTYNGYLTSSSKTSEEHFVETVSLAGSYRDWSYSGQRTELGVEFLKRGDKIVYHTLESPVEFHLDGEVLSLDKLKSLLSLREVKTIKVFTTVDNTNLHTQLVDMSMTYGQQFGPTYLDGADVTKIKPHVNHEGKTFFVLPSDDTLRSEAFEYYHTLDESFLGRYMSALNHTKKWKFPQVGGLTSIKWADNNCYLSSVLLALQQLEVKFNAPALQEAYYRARAGDAANFCALILAYSNKTVGELGDVRETMTHLLQHANLESAKRVLNVVCKHCGQKTTTLTGVEAVMYMGTLSYDNLKTGVSIPCVCGRDATQYLVQQESSFVMMSAPPAEYKLQQGTFLCANEYTGNYQCGHYTHITAKETLYRIDGAHLTKMSEYKGPVTDVFYKETSYTTTIKPVSYKLDGVTYTEIEPKLDGYYKKDNAYYTEQPIDLVPTQPLPNASFDNFKLTCSNTKFADDLNQMTGFTKPASRELSVTFFPDLNGDVVAIDYRHYSASFKKGAKLLHKPIVWHINQATTKTTFKPNTWCLRCLWSTKPVDTSNSFEVLAVEDTQGMDNLACESQQPTSEEVVENPTIQKEVIECDVKTTEVVGNVILKPSDEGVKVTQELGHEDLMAAYVENTSITIKKPNELSLALGLKTIATHGIAAINSVPWSKILAYVKPFLGQAAITTSNCAKRLAQRVFNNYMPYVFTLLFQLCTFTKSTNSRIRASLPTTIAKNSVKSVAKLCLDAGINYVKSPKFSKLFTIAMWLLLLSICLGSLICVTAAFGVLLSNFGAPSYCNGVRELYLNSSNVTTMDFCEGSFPCSICLSGLDSLDSYPALETIQVTISSYKLDLTILGLAAEWVLAYMLFTKFFYLLGLSAIMQVFFGYFASHFISNSWLMWFIISIVQMAPVSAMVRMYIFFASFYYIWKSYVHIMDGCTSSTCMMCYKRNRATRVECTTIVNGMKRSFYVYANGGRGFCKTHNWNCLNCDTFCTGSTFISDEVARDLSLQFKRPINPTDQSSYIVDSVAVKNGALHLYFDKAGQKTYERHPLSHFVNLDNLRANNTKGSLPINVIVFDGKSKCDESASKSASVYYSQLMCQPILLLDQVLVSDVGDSTEVSVKMFDAYVDTFSATFSVPMEKLKALVATAHSELAKGVALDGVLSTFVSAARQGVVDTDVDTKDVIECLKLSHHSDLEVTGDSCNNFMLTYNKVENMTPRDLGACIDCNARHINAQVAKSHNVSLIWNVKDYMSLSEQLRKQIRSAAKKNNIPFRLTCATTRQVVNVITTKISLKGGKIVSTCFKLMLKATLLCVLAALVCYIVMPVHTLSIHDGYTNEIIGYKAIQDGVTRDIISTDDCFANKHAGFDAWFSQRGGSYKNDKSCPVVAAIITREIGFIVPGLPGTVLRAINGDFLHFLPRVFSAVGNICYTPSKLIEYSDFATSACVLAAECTIFKDAMGKPVPYCYDTNLLEGSISYSELRPDTRYVLMDGSIIQFPNTYLEGSVRVVTTFDAEYCRHGTCERSEVGICLSTSGRWVLNNEHYRALSGVFCGVDAMNLIANIFTPLVQPVGALDVSASVVAGGIIAILVTCAAYYFMKFRRVFGEYNHVVAANALLFLMSFTILCLVPAYSFLPGVYSVFYLYLTFYFTNDVSFLAHLQWFAMFSPIVPFWITAIYVFCISLKHCHWFFNNYLRKRVMFNGVTFSTFEEAALCTFLLNKEMYLKLRSETLLPLTQYNRYLALYNKYKYFSGALDTTSYREAACCHLAKALNDFSNSGADVLYQPPQTSITSAVLQSGFRKMAFPSGKVEGCMVQVTCGTTTLNGLWLDDTVYCPRHVICTAEDMLNPNYEDLLIRKSNHSFLVQAGNVQLRVIGHSMQNCLLRLKVDTSNPKTPKYKFVRIQPGQTFSVLACYNGSPSGVYQCAMRPNHTIKGSFLNGSCGSVGFNIDYDCVSFCYMHHMELPTGVHAGTDLEGKFYGPFVDRQTAQAAGTDTTITLNVLAWLYAAVINGDRWFLNRFTTTLNDFNLVAMKYNYEPLTQDHVDILGPLSAQTGIAVLDMCAALKELLQNGMNGRTILGSTILEDEFTPFDVVRQCSGVTFQGKFKKIVKGTHHWMLLTFLTSLLILVQSTQWSLFFFVYENAFLPFTLGIMAIAACAMLLVKHKHAFLCLFLLPSLATVAYFNMVYMPASWVMRIMTWLELADTSLSGYRLKDCVMYASALVLLILMTARTVYDDAARRVWTLMNVITLVYKVYYGNALDQAISMWALVISVTSNYSGVVTTIMFLARAIVFVCVEYYPLLFITGNTLQCIMLVYCFLGYCCCCYFGLFCLLNRYFRLTLGVYDYLVSTQEFRYMNSQGLLPPKSSIDAFKLNIKLLGIGGKPCIKVATVQSKMSDVKCTSVVLLSVLQQLRVESSSKLWAQCVQLHNDILLAKDTTEAFEKMVSLLSVLLSMQGAVDINRLCEEMLDNRATLQAIASEFSSLPSYAAYATAQEAYEQAVANGDSEVVLKKLKKSLNVAKSEFDRDAAMQRKLEKMADQAMTQMYKQARSEDKRAKVTSAMQTMLFTMLRKLDNDALNNIINNARDGCVPLNIIPLTTAAKLMVVVPDYGTYKNTCDGNTFTYASALWEIQQVVDADSKIVQLSEINMDNSPNLAWPLIVTALRANSAVKLQNNELSPVALRQMSCAAGTTQTACTDDNALAYYNNSKGGRFVLALLSDHQDLKWARFPKSDGTGTIYTELEPPCRFVTDTPKGPKVKYLYFIKGLNNLNRGMVLGSLAATVRLQAGNATEVPANSTVLSFCAFAVDPAKAYKDYLASGGQPITNCVKMLCTHTGTGQAITVTPEANMDQESFGGASCCLYCRCHIDHPNPKGFCDLKGKYVQIPTTCANDPVGFTLRNTVCTVCGMWKGYGCSCDQLREPLMQSADASTFLNRVCGVSAARLTPCGTGTSTDVVYRAFDIYNEKVAGFAKFLKTNCCRFQEKDEEGNLLDSYFVVKRHTMSNYQHEETIYNLVKDCPAVAVHDFFKFRVDGDMVPHISRQRLTKYTMADLVYALRHFDEGNCDTLKEILVTYNCCDDDYFNKKDWYDFVENPDILRVYANLGERVRQSLLKTVQFCDAMRDAGIVGVLTLDNQDLNGNWYDFGDFVQVAPGCGVPIVDSYYSLLMPILTLTRALAAESHMDADLAKPLIKWDLLKYDFTEERLCLFDRYFKYWDQTYHPNCINCLDDRCILHCANFNVLFSTVFPPTSFGPLVRKIFVDGVPFVVSTGYHFRELGVVHNQDVNLHSSRLSFKELLVYAADPAMHAASGNLLLDKRTTCFSVAALTNNVAFQTVKPGNFNKDFYDFAVSKGFFKEGSSVELKHFFFAQDGNAAISDYDYYRYNLPTMCDIRQLLFVVEVVDKYFDCYDGGCINANQVIVNNLDKSAGFPFNKWGKARLYYDSMSYEDQDALFAYTKRNVIPTITQMNLKYAISAKNRARTVAGVSICSTMTNRQFHQKLLKSIAATRGATVVIGTSKFYGGWHNMLKTVYSDVETPHLMGWDYPKCDRAMPNMLRIMASLVLARKHNTCCNLSHRFYRLANECAQVLSEMVMCGGSLYVKPGGTSSGDATTAYANSVFNICQAVTANVNALLSTDGNKIADKYVRNLQHRLYECLYRNRDVDHEFVDEFYAYLRKHFSMMILSDDAVVCYNSNYAAQGLVASIKNFKAVLYYQNNVFMSEAKCWTETDLTKGPHEFCSQHTMLVKQGDDYVYLPYPDPSRILGAGCFVDDIVKTDGTLMIERFVSLAIDAYPLTKHPNQEYADVFHLYLQYIRKLHDELTGHMLDMYSVMLTNDNTSRYWEPEFYEAMYTPHTVLQAVGACVLCNSQTSLRCGACIRRPFLCCKCCYDHVISTSHKLVLSVNPYVCNAPGCDVTDVTQLYLGGMSYYCKSHKPPISFPLCANGQVFGLYKNTCVGSDNVTDFNAIATCDWTNAGDYILANTCTERLKLFAAETLKATEETFKLSYGIATVREVLSDRELHLSWEVGKPRPPLNRNYVFTGYRVTKNSKVQIGEYTFEKGDYGDAVVYRGTTTYKLNVGDYFVLTSHTVMPLSAPTLVPQEHYVRITGLYPTLNISDEFSSNVANYQKVGMQKYSTLQGPPGTGKSHFAIGLALYYPSARIVYTACSHAAVDALCEKALKYLPIDKCSRIIPARARVECFDKFKVNSTLEQYVFCTVNALPETTADIVVFDEISMATNYDLSVVNARLRAKHYVYIGDPAQLPAPRTLLTKGTLEPEYFNSVCRLMKTIGPDMFLGTCRRCPAEIVDTVSALVYDNKLKAHKDKSAQCFKMFYKGVITHDVSSAINRPQIGVVREFLTRNPAWRKAVFISPYNSQNAVASKILGLPTQTVDSSQGSEYDYVIFTQTTETAHSCNVNRFNVAITRAKIGILCIMSDRDLYDKLQFTSLEIPRRNVATLQAENVTGLFKDCSKIITGLHPTQAPTHLSVDIKFKTEGLCVDIPGIPKDMTYRRLISMMGFKMNYQVNGYPNMFITREEAIRHVRAWIGFDVEGCHATRDAVGTNLPLQLGFSTGVNLVAVPTGYVDTENNTEFTRVNAKPPPGDQFKHLIPLMYKGLPWNVVRIKIVQMLSDTLKGLSDRVVFVLWAHGFELTSMKYFVKIGPERTCCLCDKRATCFSTSSDTYACWNHSVGFDYVYNPFMIDVQQWGFTGNLQSNHDQHCQVHGNAHVASCDAIMTRCLAVHECFVKRVDWSVEYPIIGDELRVNSACRKVQHMVVKSALLADKFPVLHDIGNPKAIKCVPQAEVEWKFYDAQPCSDKAYKIEELFYSYATHHDKFTDGVCLFWNCNVDRYPANAIVCRFDTRVLSNLNLPGCDGGSLYVNKHAFHTPAFDKSAFTNLKQLPFFYYSDSPCESHGKQVVSDIDYVPLKSATCITRCNLGGAVCRHHANEYRQYLDAYNMMISAGFSLWIYKQFDTYNLWNTFTRLQSLENVAYNVVNKGHFDGHAGEAPVSIINNAVYTKVDGIDVEIFENKTTLPVNVAFELWAKRNIKPVPEIKILNNLGVDIAANTVIWDYKREAPAHVSTIGVCTMTDIAKKPTESACSSLTVLFDGRVEGQVDLFRNARNGVLITEGSVKGLTPSKGPAQASVNGVTLIGESVKTQFNYFKKVDGIIQQLPETYFTQSRDLEDFKPRSQMETDFLELAMDEFIQRYKLEGYAFEHIVYGDFSHGQLGGLHLMIGLAKRSQDSPLKLEDFIPMDSTVKNYFITDAQTGSSKCVCSVIDLLLDDFVEIIKSQDLSVISKVVKVTIDYAEISFMLWCKDGHVETFYPKLQASQAWQPGVAMPNLYKMQRMLLEKCDLQNYGENAVIPKGIMMNVAKYTQLCQYLNTLTLAVPYNMRVIHFGAGSDKGVAPGTAVLRQWLPTGTLLVDSDLNDFVSDADSTLIGDCATVHTANKWDLIISDMYDPRTKHVTKENDSKEGFFTYLCGFIKQKLALGGSIAVKITEHSWNADLYKLMGHFSWWTAFVTNVNASSSEAFLIGANYLGKPKEQIDGYTMHANYIFWRNTNPIQLSSYSLFDMSKFPLKLRGTAVMSLKENQINDMIYSLLEKGRLIIRENNRVVVSSDILVNN

SEQ ID NO: 28 - protein, 6758 aa, human coronavirus 229E
  MISC_FEATURE: ORF 1 AB
MACNRVTLAVASDSEISANGCSTIAQAVRRYSEAASNGFRACRFVSLDLQDCIVGIADDTYVMGLHGNQTLFCNIMKFSDRPFMLHGWLVFSNSNYLLEEFDVVFGKRGGGNVTYTDQYLCGADGKPVMSEDLWQFVDHFGENEEIIINGHTYVCAWLTKRKPLDYKRQNNLAIEEIEYVHGDALHTLRNGSVLEMAKEVKTSSKVVLSDALDKLYKVFGSPVMTNGSNILEAFTKPVFISALVQCTCGTKSWSVGDWTGFKSSCCNVISNKLCVVPGNVKPGDAVITTQQAGAGIKYFCGMTLKFVANIEGVSVWRVIALQSVDCFVASSTFVEEEHVNRMDTFCFNVRNSVTDECRLAMLGAEMTSNVRRQVASGVIDISTGWFDVYDDIFAESKPWFVRKAEDIFGPCWSALASALKQLKVTTGELVRFVKSICNSAVAVVGGTIQILASVPEKFLNAFDVFVTAIQTVFDCAVETCTIAGKAFDKVFDYVLLDNALVKLVTTKLKGVRERGLNKVKYATVVVGSTEEVKSSRVERSTAVLTIANNYSKLFDEGYTVVIGDVAYFVSDGYFRLMASPNSVLTTAVYKPLFAFNVNVMGTRPEKFPTTVTCENLESAVLFVNDKITEFQLDYSIDVIDNEIIVKPNISLCVPLYVRDYVDKWDDFCRQYSNESWFEDDYRAFISVLDITDAAVKAAESKAFVDTIVPPCPSILKVIDGGKIWNGVIKNVNSVRDWLKSLKLNLTQQGLLGTCAKRFKRWLGILLEAYNAFLDTVVSTVKIGGLTFKTYAFDKPYIVIRDIVCKVENKTEAEWIELFPHNDRIKSFSTFESAYMPIADPTHFDIEEVELLDAEFVEPGCGGILAVIDEHVFYKKDGVYYPSNGTNILPVAFTKAAGGKVSFSDDVEVKDIEPVYRVKLCFEFEDEKLVDVCEKAIGKKIKHEGDWDSFCKTIQSALSVVSCYVNLPTYYIYDEEGGNDLSLPVMISEWPLSVQQAQQEATLPDIAEDVVDQVEEVNSIFDIETVDVKHDVSPFEMPFEELNGLKILKQLDNNCWVNSVMLQIQLTGILDGDYAMQFFKMGRVAKMIERCYTAEQCIRGAMGDVGLCMYRLLKDLHTGFMVMDYKCSCTSGRLEESGAVLFCTPTKKAFPYGTCLNCNAPRMCTIRQLQGTIIFVQQKPEPVNPVSFVVKPVCSSIFRGAVSCGHYQTNIYSQNLCVDGFGVNKIQPWTNDALNTICIKDADYNAKVEISVTPIKNTVDTTPKEEFVVKEKLNAFLVHDNVAFYQGDVDTVVNGVDFDFIVNAANENLAHGGGLAKALDVYTKGKLQRLSKEHIGLAGKVKVGTGVMVECDSLRIFNVVGPRKGKHERDLLIKAYNTINNEQGTPLTPILSCGIFGIKLETSLEVLLDVCNTKEVKVFVYTDTEVCKVKDFVSGLVNVQKVEQPKIEPKPVSVIKVAPKPYRVDGKFSYFTEDLLCVADDKPIVLFTDSMLTLDDRGLALDNALSGVLSAAIKDCVDINKAIPSGNLIKFDIGSVVVYMCVVPSEKDKHLDNNVQRCTRKLNRLMCDIVCTIPADYILPLVLSSLTCNVSFVGELKAAEAKVITIKVTEDGVNVHDVTVTTDKSFEQQVGVIADKDKDLSGAVPSDLNTSELLTKAIDVDWVEFYGFKDAVTFATVDHSAFAYESAVVNGIRVLKTSDNNCWVNAVCIALQYSKPHFISQGLDAAWNKFVLGDVEIFVAFVYYVARLMKGDKGDAEDTLTKLSKYLANEAQVQLEHYSSCVECDAKFKNSVASINSAIVCASVKRDGVQVGYCVHGIKYYSRVRSVRGRAIIVSVEQLEPCAQSRLLSGVAYTAFSGPVDKGHYTVYDTAKKSMYDGDRFVKHDLSLLSVTSVVMVGGYVAPVNTVKPKPVINQLDEKAQKFFDFGDFLIHNFVIFFTWLLSMFTLCKTAVTTGDVKIMAKAPQRTGVVLKRSLKYNLKASAAVLKSKWWLLAKFTKLLLLIYTLYSVVLLCVRFGPFNFCSETVNGYAKSNFVKDDYCDGSLGCKMCLFGYQELSQFSHLDVVWKHITDPLFSNMQPFIVMVLLLIFGDNYLRCFLLYFVAQMISTVGVFLGYKETNWFLHFIPFDVICDELLVTVIVIKVISFVRHVLFGCENPDCIACSKSARLKRFPVNTIVNGVQRSFYVNANGGSKFCKKHRFFCVDCDSYGYGSTFITPEVSRELGNITKTNVQPTGPAYVMIDKVEFENGFYRLYSCETFWRYNFDITESKYSCKEVFKNCNVLDDFIVFNNNGTNVTQVKNASVYFSQLLCRPIKLVDSELLSTLSVDFNGVLHKAYIDVLRNSFGKDLNANMSLAECKRALGLSISDHEFTSAISNAHRCDVLLSDLSFNNFVSSYAKPEEKLSAYDLACCMRAGAKVVNANVLTKDQTPIVWHAKDFNSLSAEGRKYIVKTSKAKGLTFLLTINENQAVTQIPATSIVAKQGAGDAGHSLTWLWLLCGLVCLIQFYLCFFMPYFMYDIVSSFEGYDFKYIENGQLKNFEAPLKCVRNVFENFEDWHYAKFGFTPLNKQSCPIVVGVSEIVNTVAGIPSNVYLVGKTLIFTLQAAFGNAGVCYDIFGVTTPEKCIFTSACTRLEGLGGNNVYCYNTALMEGSLPYSSIQANAYYKYDNGNFIKLPEVIAQGFGFRTVRTIATKYCRVGECVESNAGVCFGFDKWFVNDGRVANGYVCGTGLWNLVFNILSMFSSSFSVAAMSGQILLNCALGAFAIFCCFLVTKFRRMFGDLSVGVCTVVVAVLLNNVSYIVTQNLVTMIAYAILYFFATRSLRYAWIWCAAYLIAYISFAPWWLCAWYFLAMLTGLLPSLLKLKVSTNLFEGDKFVGTFESAAAGTFVIDMRSYEKLANSISPEKLKSYAASYNRYKYYSGNANEADYRCACYAYLAKAMLDFSRDHNDILYTPPTVSYGSTLQAGLRKMAQPSGFVEKCVVRVCYGNTVLNGLWLGDIVYCPRHVIASNTTSAIDYDHEYSIMRLHNFSIISGTAFLGVVGATMHGVTLKIKVSQTNMHTPRHSFRTLKSGEGFNILACYDGCAQGVFGVNMRTNWTIRGSFINGACGSPGYNLKNGEVEFVYMHQIELGSGSHVGSSFDGVMYGGFEDQPNLQVESANQMLTVNVVAFLYAAILNGCTWWLKGEKLFVEHYNEWAQANGFTAMNGEDAFSILAAKTGVCVERLLHAIQVLNNGFGGKQILGYSSLNDEFSINEVVKQMFGVNLQSGKTTSMFKSISLFAGFFVMFWAELFVYTTTIWVNPGFLTPFMILLVALSLCLTFVVKHKVLFLQVFLLPSIIVAAIQNCAWDYHVTKVLAEKFDYNVSVMQMDIQGFVNIFICLFVALLHTWRFAKERCTHWCTYLFSLIAVLYTALYSYDYVSLLVMLLCAISNEWYIGAIIFRICRFGVAFLPVEYVSYFDGVKTVLLFYMLLGFVSCMYYGLLYWINRFCKCTLGVYDFCVSPAEFKYMVANGLNAPNGPFDALFLSFKLMGIGGPRTIKVSTVQSKLTDLKCTNVVLMGILSNMNIASNSKEWAYCVEMHNKINLCDDPETAQELLLALLAFFLSKHSDFGLGDLVDSYFENDSILQSVASSFVGMPSFVAYETARQEYENAVANGSSPQIIKQLKKAMNVAKAEFDRESSVQKKINRMAEQAAAAMYKEARAVNRKSKVVSAMHSLLFGMLRRLDMSSVDTILNMARNGVVPLSVIPATSAARLVVVVPDHDSFVKMMVDGFVHYAGVVWTLQEVKDNDGKNVHLKDVTKENQEILVWPLILTCERVVKLQNNEIMPGKMKVKATKGEGDGGITSEGNALYNNEGGRAFMYAYVTTKPGMKYVKWEHDSGVVTVELEPPCRFVIDTPTGPQIKYLYFVKNLNNLRRGAVLGYIGATVRLQAGKQTEFVSNSHLLTHCSFAVDPAAAYLDAVKQGAKPVGNCVKMLTNGSGSGQAITCTIDSNTTQDTYGGASVCIYCRAHVAHPTMDGFCQYKGKWVQVPIGTNDPIRFCLENTVCKVCGCWLNHGCTCDRTAIQSFDNSYLNRVRGSSAARLEPCNGTDIDYCVRAFDVYNKDASFIGKNLKSNCVRFKNVDKDDAFYIVKRCIKSVMDHEQSMYNLLKGCNAVAKHDFFTWHEGRTIYGNVSRQDLTKYTMMDLCFALRNFDEKDCEVFKEILVLTGCCSTDYFEMKNWFDPIENEDIHRVYAALGKVVANAMLKCVAFCDEMVLKGVVGVLTLDNQDLNGNFYDFGDFVLCPPGMGIPYCTSYYSYMMPVMGMTNCLASECFMKSDIFGQDFKTFDLLKYDFTEHKEVLFNKYFKYWGQDYHPDCVDCHDEMCILHCSNFNTLFATTIPNTAFGPLCRKVFIDGVPVVATAGYHFKQLGLVWNKDVNTHSTRLTITELLQFVTDPTLIVASSPALVDKRTVCFSVAALSTGLTSQTVKPGHFNKEFYDFLRSQGFFDEGSELTLKHFFFTQKGDAAIKDFDYYRYNRPTMLDIGQARVAYQVAARYFDCYEGGCITSREVVVTNLNKSAGWPLNKFGKAGLYYESISYEEQDAIFSLTKRNILPTMTQLNLKYAISGKERARTVGGVSLLATMTTRQFHQKCLKSIVATRNATVVIGTTKFYGGWDNMLKNLMADVDDPKLMGWDYPKCDRAMPSMIRMLSAMILGSKHVTCCTASDKFYRLSNELAQVLTEVVYSNGGFYFKPGGTTSGDATTAYANSVFNIFQAVSSNINCVLSVNSSNCNNFNVKKLQRQLYDNCYRNSNVDESFVDDFYGYLQKHFSMMILSDDSVVCYNKTYAGLGYIADISAFKATLYYQNGVFMSTAKCWTEEDLSIGPHEFCSQHTMQIVDENGKYYLPYPDPSRIISAGVFVDDITKTDAVILLERYVSLAIDAYPLSKHPKPEYRKVFYALLDWVKHLNKTLNEGVLESFSVTLLDEHESKFWDESFYASMYEKSTVLQAAGLCVVCGSQTVLRCGDCLRRPMLCTKCAYDHVFGTDHKFILAITPYVCNTSGCNVNDVTKLYLGGLNYYCVDHKPHLSFPLCSAGNVFGLYKSSALGSMDIDVFNKLSTSDWSDIRDYKLANDAKESLRLFAAETVKAKEESVKSSYAYATLKEIVGPKELLLLWESGKAKPPLNRNSVFTCFQITKDSKFQVGEFVFEKVDYGSDTVTYKSTATTKLVPGMLFILTSHNVAPLRAPTMANQEKYSTIYKLHPSFNVSDAYANLVPYYQLIGKQRITTIQGPPGSGKSHCSIGIGVYYPGARIVFTACSHAAVDSLCAKAVTAYSVDKCTRIIPARARVECYSGFKPNNNSAQYVFSTVNALPEVNADIVVVDEVSMCTNYDLSVINQRISYKHIVYVGDPQQLPAPRVLISKGVMEPIDYNVVTQRMCAIGPDVFLHKCYRCPAEIVNTVSELVYENKFVPVKEASKQCFKIFERGSVQVDNGSSINRRQLDVVKRFIHKNSTWSKAVFISPYNSQNYVAARLLGLQTQTVDSAQGSEYDYVIFAQTSDTAHACNANRFNVAITRAKKGIFCIMSDRTLFDALKFFEITMTDLQSESSCGLFKDCARNPIDLPPSHATTYLSLSDRFKTSGDLAVQIGNNNVCTYEHVISYMGFRFDVSMPGSHSLFCTRDFAMRHVRGWLGMDVEGAHVTGDNVGTNVPLQVGFSNGVDFVAQPEGCVLTNTGSVVKPVRARAPPGEQFTHIVPLLRKGQPWSVLRKRIVQMIADFLAGSSDVLVFVLWAGGLELTTMRYFVKIGAVKHCQCGTVATCYNSVSNDYCCFKHALGCDYVYNPYVIDIQQWGYVGSLSTNHHAICNVHRNEHVASGDAIMTRCLAVYDCFVKNVDWSITYPMIANENAINKGGRTVQSHIMRAAIKLYNPKAIHDIGNPKGIRCAVTDAKWYCYDKNPINSNVKTLEYDYMTHGQMDGLCLFWNCNVDMYPEFSIVCRFDTRTRSTLNLEGVNGGSLYVNNHAFHTPAYDKRAMAKLKPAPFFYYDDGSCEVVHDQVNYVPLRATNCITKCNIGGAVCSKHANLYRAYVESYNIFTQAGFNIWVPTTFDCYNLWQTFTEVNLQGLENIAFNVVNKGSFVGADGELPVAISGDKVFVRDGNTDNLVFVNKTSLPTNIAFELFAKRKVGLTPPLSILKNLGVVATYKFVLWDYEAERPLTSFTKSVCGYTDFAEDVCTCYDNSIQGSYERFTLSTNAVLFSATAVKTGGKSLPAIKLNFGMLNGNAIATVKSEDGNIKNINWFVYVRKDGKPVDHYDGFYTQGRNLQDFLPRSTMEEDFLNMDIGVFIQKYGLEDFNFEHVVYGDVSKTTLGGLHLLISQVRLSKMGILKAEEFVAASDITLKCCTVTYLNDPSSKTVCTYMDLLLDDFVSVLKSLDLTVVSKVHEVIIDNKPWRWMLWCKDNAVATFYPQLQSAEWKCGYSMPGIYKTQRMCLEPCNLYNYGAGLKLPSGIMFNVVKYTQLCQYFNSTTLCVPHNMRVLHLGAGSDYGVAPGTAVLKRWLPHDAIVVDNDVVDYVSDADFSVTGDCATVYLEDKFDLLISDMYDGRTKAIDGENVSKEGFFTYINGFICEKLAIGGSIAIKVTEYSWNKKLYELVQRFSFWTMFCTSVNTSSSEAFVVGINYLGDFAQGPFIDGNIIHANYVFWRNSTVMSLSYNSVLDLSKFNCKHKATVVVQLKDSDINEMVLSLVRSGKLLVRGNGKCLSFSNHLVSTK

SEQ ID NO: 29 - protein, 2666 aa, transmissible gastroenteritus virus
  MISC_FEATURE: ORF 1B
EPCNGTDPDHVSRAFDIYNKDVACIGKFLKTNCSRFRNLDKHDAYYIVKRCTKTVMDHEQVCYNDLKDSGAVAEHDFFTYKEGRCEFGNVARRNLTKYTMMDLCYAIRNFDEKNCEVLKEILVTVGACTEEFFENKDWFDPVENEAIHEVYAKLGPIVANAMLKCVAFCDAIVEKGYIGVITLDNQDLNGNFYDFGDFVKTAPGFGCACVTSYYSYMMPLMGMTSCLESENFVKSDIYGSDYKQYDLLAYDFTEHKEYLFQKYFKYWDRTYHPNCSDCTSDECIIHCANFNTLFSMTIPMTAFGPLVRKVHIDGVPVVVTAGYHFKQLGIVWNLDVKLDTMKLSMTDLLRFVTDPTLLVASSPALLDQRTVCFSIAALSTGITYQTVKPGHFNKDFYDFITERGFFEEGSELTLKHFFFAQGGEAAMTDFNYYRYNRVTVLDICQAQFVYKIVGKYFECYDGGCINAREVVVTNYDKSAGYPLNKFGKARLYYETLSYEEQDALFALTKRNVLPTMTQMNLKYAISGKARARTVGGVSLLSTMTTRQYHQKHLKSIAATRNATVVIGSTKFYGGWDNMLKNLMRDVDNGCLMGWDYPKCDRALPNMIRMASAMILGSKHVGCCTHNDRFYRLSNELAQVLTEVVHCTGGFYFKPGGTTSGDGTTAYANSAFNIFQAVSANVNKLLGVDSNACNNVTVKSIQRKIYDNCYRSSSIDEEFVVEYFSYLRKHFSMMILSDDGVVCYNKDYADLGYVADINAFKATLYYQNNVFMSTSKCWVEPDLSVGPHEFCSQHTLQIVGPDGDYYLPYPDPSRILSAGVFVDDIVKTDNVIMLERYVSLAIDAYPLTKHPKPAYQKVFYTLLDWVKHLQKNLNAGVLDSFSVTMLEEGQDKFWSEEFYASLYEKSTVLQAAGMCVVCGSQTVLRCGDCLRRPLLCTKCAYDHVMGTKHKFIMSITPYVCSFNGCNVNDVTKLFLGGLSYYCMNHKPQLSFPLCANGNVFGLYKSSAVGSEAVEDFNKLAVSDWTNVEDYKLANNVKESLKIFAAETVKAKEESVKSEYAYAVLKEVIGPKEIVLQWEASKTKPPLNRNSVFTCFQISKDTKIQLGEFVFEQSEYGSDSVYYKSTSTYKLTPGMIFVLTSHNVSPLKAPILVNQEKYNTISKLYPVFNIAEAYNTLVPYYQMIGKQKFTTIQGPPGSGKSHCVIGLGLYYPQARIVYTACSHAAVDALCEKAAKNFNVDRCSRIIPQRIRVDCYTGFKPNNTNAQYLFCTVNALPEASCDIVVVDEVSMCTNYDLSVINSRLSYKHIVYVGDPQQLPAPRTLINKGVLQPQDYNVVTKRMCTLGPDVFLHKCYRCPAEIVKTVSALVYENKFVPVNPESKQCFKMFVKGQVQIESNSSINNKQLEVVKAFLAHNPKWRKAVFISPYNSQNYVARRLLGLQTQTVDSAQGSEYDYVIYTQTSDTQHATNVNRFNVAITRAKVGILCIMCDRTMYENLDFYELKDSKIGLQAKPETCGLFKDCSKSEQYIPPAYATTYMSLSDNFKTSDGLAVNIGTKDVKYANVISYMGFRFEANIPGYHTLFCTRDFAMRNVRAWLGFDVEGAHVCGDNVGTNVPLQLGFSNGVDFVVQTEGCVITEKGNSIEVVKARAPPGEQFAHLIPLMRKGQPWHIVRRRIVQMVCDYFDGLSDILIFVLWAGGLELTTMRYFVKIGRPQKCECGKSATCYSSSQSVYACFKHALGCDYLYNPYCIDIQQWGYTGSLSMNHHEVCNIHRNEHVASGDAIMTRCLAIHDCFVKRVDWSIVYPFIDNEEKINKAGRIVQSHVMKAALKIFNPAAIHDVGNPKGIRCATTPIPWFCYDRDPINNNVRCLDYDYMVHGQMNGLMLFWNCNVDMYPEFSIVCRFDTRTRSKLSLEGCNGGALYVNNHAFHTPAYDRRAFAKLKPMPFFYYDDSNCELVDGQPNYVPLKSNVCITKCNIGGAVCKKHAALYRAYVEDYNIFMQAGFTIWCPQNFDTYMLWHGFVNSKALQSLENVAFNVVKKGAFTGLKGDLPTAVIADKIMVRDGPTDKCIFTNKTSLPTNVAFELYAKRKLGLTPPLTILRNLGVVATYKFVLWDYEAERPFSNFTKQVCSYTDLDSEVVTCFDNSIAGSFERFTTTRDAVLISNNAVKGLSAIKLQYGLLNDLPVSTVGNKPVTWYIYVRKNGEYVEQIDSYYTQGRTFETFKPRSTMEEDFLSMDTTLFIQKYGLEDYGFEHVVFGDVSKTTIGGMHLLISQVRLAKMGLFSVQEFMNNSDSTLKSCCITYADDPSSKNVCTYMDILLDDFVTIIKSLDLNVVSKVVDVIVDCKAWRWMLWCENSHIKTFYPQLQSAEWNPGYSMPTLYKIQRMCLERCNLYNYGAQVKLPDGITTNVVKYTQLCQYLNTTTLCVPHKMRVLHLGAAGASGVAPGSTVLRRWLPDDAILVDNDLRDYVSDADFSVTGDCTSLYIEDKFDLLVSDLYDGSTKSIDGENTSKDGFFTYINGFIKEKLSLGGSVAIKITEFSWNKDLYELIQRFEYWTVFCTSVNTSSSEGFLIGINYLGPYCDKAIVDGNIMHANYIFWRNSTIMALSHNSVLDTPKFKCRCNNALIVNLKEKELNEMVIGLLRKGKLLIRNNGKLLNFGNHFVNTP

SEQ ID NO: 30 - protein, 1447 aa, transmissible gastroenteritus virus
  MISC_FEATURE: Spike protein
MKKLFVVLVVMPLIYGDNFPCSKLTNRTIGNQWNLIETFLLNYSSRLPPNSDVVLGDYFPTVQPWFNCIRNDSNDLYVTLENLKALYWDYATENITWNHRQRLNVVVNGYPYSITVTTTRNFNSAEGAIICICKGSPPTTTTESSLTCNWGSECRLNHKFPICPSNSEANCGNMLYGLQWFADEVVAYLHGASYRISFENQWSGTVTFGDMRATTLEVAGTLVDLWWFNPVYDVSYYRVNNKNGTTVVSNCTDQCASYVANVFTTQPGGFIPSDFSFNNWFLLTNSSTLVSGKLVTKQPLLVNCLWPVPSFEEAASTFCFEGAGFDQCNGAVLNNTVDVIRFNLNFTTNVQSGKGATVFSLNTTGGVTLEISCYTVSDSSFFSYGEIPFGVTDGPRYCYVHYNGTALKYLGTLPPSVKEIAISKWGHFYINGYNFFSTFPIDCISFNLTTGDSDVFWTIAYTSYTEALVQVENTAITKVTYCNSHVNNIKCSQITANLNNGFYPVSSSEVGLVNKSVVLLPSFYTHTIVNITIGLGMKRSGYGQPIASTLSNITLPMQDHNTDVYCIRSDQFSVYVHSTCKSALWDNIFKRNCTDVLDATAVIKTGTCPFSFDKLNNYLTFNKFCLSLSPVGANCKFDVAARTRTNEQVVRSLYVIYEEGDNIVGVPSDNSGVHDLSVLHLDSCTDYNIYGRTGVGIIRQTNRTLLSGLYYTSLSGDLLGFKNVSDGVIYSVTPCDVSAQAAVIDGTIVGAITSINSELLGLTHWTTTPNFYYYSIYNYTNDRTRGTAIDSNDVDCEPVITYSNIGVCKNGAFVFINVTHSDGDVQPISTGNVTIPTNFTISVQVEYIQVYTTPVSIDCSRYVCNGNPRCNKLLTQYVSACQTIEQALAMGARLENMEVDSMLFVSENALKLASVEAFNSSETLDPIYKEWPNIGGSWLEGLKYILPSHNSKRKYRSAIEDLLFDKVVTSGLGTVDEDYKRCTGGYDIADLVCAQYYNGIMVLPGVANADKMTMYTASLAGGITLGALGGGAVAIPFAVAVQARLNYVALQTDVLNKNQQILASAFNQAIGNITQSFGKVNDAIHQTSRGLATVAKALAKVQDVVNIQGQALSHLTVQLQNNFQAISSSISDIYNRLDELSADAQVDRLITGRLTALNAFVSQTLTRQAEVRASRQLAKDKVNECVRSQSQRFGFCGNGTHLFSLANAAPNGMIFFHTVLLPTAYETVTAWPGICASDGDRTFGLVVKDVQLTLFRNLDDKFYLTPRTMYQPRVATSSDFVQIEGCDVLFVNATVSDLPSIIPDYIDINQTVQDILENFRPNWTVPELTFDIFNATYLNLTGEIDDLEFRSEKLHNTTVELAILIDNINNTLVNLEWLNRIETYVKWPWYVWLLIGLVVIFCIPLLLFCCCSTGCCGCIGCLGSCCHSICSRRQFENYEPIEKVHVH

SEQ ID NO: 31 - protein, 1162 aa, avian infectious bronchitis virus
  MISC_FEATURE: spike protein
MLVTPLLLVTLLCALCSAVLYDSSSYVYYYQSAFRPPSGWHLQGGAYAVVNISSEFNNAGSSSGCTVGIIHGGRVVNASSIAMTAPSSGMAWSSSQFCTAHCNFSDTTVFVTHCYKHGGCPLTGMLQQNLIRVSAMKNGQLFYNLTVSVAKYPTFRSFQCVNNLTSVYLNGDLVYTSNETIDVTSAGVYFKAGGPITYKVMREVKALAYFVNGTAQDVILCDGSPRGLLACQYNTGNFSDGFYPFTNSSLVKQKFIVYRENSVNTTCTLHNFIFHNETGANPNPSGVQNIQTYQTKTAQSGYYNFNFSFLSSFVYKESNFMYGSYHPSCKFRLETINNGLWFNSLSVSIAYGPLQGGCKQSVFKGRATCCYAYSYGGPSLCKGVYSGELDHNFECGLLVYVTKSGGSRIQTATEPPVITQNNYNNITLNTCVDYNIYGRTGQGFITNVTDSAVSYNYLADAGLAILDTSGSIDIFVVQGEYGLNYYKVNPCEDVNQQFVVSGGKLVGILTSRNETGSQLLENQFYIKITNGTRRFRRSITENVANCPYVSYGKFCIKPDGSIATIVPKQLEQFVAPLFNVTENVLIPNSFNLTVTDEYIQTRMDKVQINCLQYVCGSSLDCRKLFQQYGPVCDNILSVVNSVGQKEDMELLNFYSSTKPAGFNTPVLSNVSTGEFNISLLLTNPSSRRKRSLIEDLLFTSVESVGLPTNDAYKNCTAGPLGFFKDLACAREYNGLLVLPPIITAEMQALYTSSLVASMAFGGITAAGAIPFATQLQARINHLGITQSLLLKNQEKIAASFNKAIGHMQEGFRSTSLALQQIQDVVSKQSAILTETMASLNKNFGAISSVIQEIYQQFDAIQANAQVDRLITGRLSSLSVLASAKQAEYIRVSQQRELATQKINECVKSQSIRYSFCGNGRHVLTIPQNAPNGIVFIHFSYTPDSFVNVTAIVGFCVKPANASQYAIVPANGRGIFIQVNGSYYITARDMYMPRAITAGDVVTLTSCQANYVSVNKTVITTFVDNDDFDFNDELSKWWNDTKHELPDFDKFNYTVPILDIDSEIDRIQGVIQGLNDSLIDLEKLSILKTYIKWPWYVWLAIAFATIIFILILGWVFFMTGCCGCCCGCFGIMPLMSKCGKKSSYYTTFDNDVVTEQYRPKKSV

SEQ ID NO: 32 - protein, 1363 aa, bovine coronavirus
  MISC_FEATURE: spike protein
MFLILLISLPMAFAVIGDLKCTTVSINDVDTGAPSISTDIVDVTNGLGTYYVLDRVYLNTTLLLNGYYPTSGSTYRNMALKGTLLLSRLWFKPPFLSDFINGIFAKVKNTKVIKKGVMYSEFPAITIGSTFVNTSYSVVVQPHTTNLDNKLQGLLEISVCQYTMCEYPHTICHPKLGNKRVELWHWDTGVVSCLYKRNFTYDVNADYLYFHFYQEGGTFYAYFTDTGVVTKFLFNVYLGTVLSHYYVLPLTCSSAMTLEYWVTPLTSKQYLLAFNQDGVIFNAVDCKSDFMSEIKCKTLSIAPSTGVYELNGYTVQPIADVYRRIPNLPDCNIEAWLNDKSVPSPLNWERKTFSNCNFNMSSLMSFIQADSFTCNNIDAAKIYGMCFSSITIDKFAIPNGRKVDLQLGNLGYLQSFNYRIDTTATSCQLYYNLPAANVSVSRFNPSTWNRRFGFTEQFVFKPQPVGVFTHHDVVYAQHCFKAPKNFCPCKLDGSLCVGNGPGIDAGYKNSGIGTCPAGTNYLTCHNAAQCDCLCTPDPITSKSTGPYKCPQTKYLVGIGEHCSGLAIKSDYCGGNPCTCQPQAFLGWSVDSCLQGDRCNIFANFIFHDVNSGTTCSTDLQKSNTDIILGVCVNYDLYGITGQGIFVEVNATYYNSWQNLLYDSNGNLYGFRDYLTNRTFMIRSCYSGRVSAAFHANSSEPALLFRNIKCNYVFNNTLSRQLQPINYFDSYLGCVVNADNSTSSVVQTCDLTVGSGYCVDYSTKRRSRRAITTGYRFTNFEPFTVNSVNDSLEPVGGLYEIQIPSEFTIGNMEEFIQTSSPKVTIDCSAFVCGDYAACKSQLVEYGSFCDNINAILTEVNELLDTTQLQVANSLMNGVTLSTKLKDGVNFNVDDINFSPVLGCLGSACNKVSSRSAIEDLLFSKVKLSDVGFVEAYNNCTGGAEIRDLICVQSYNGIKVLPPLLSVNQISGYTLAATSASLFPPLSAAVGVPFYLNVQYRINGIGVTMDVLSQNQKLIANAFNNALDAIQEGFDATNSALVKIQAVVNANAEALNNLLQQLSNRFGAISSSLQEILSRLDALEAQAQIDRLINGRLTALNVYVSQQLSDSTLVKFSAAQAMEKVNECVKSQSSRINFCGNGNHIISLVQNAPYGLYFIHFSYVPTKYVTAKVSPGLCIAGDRGIAPKSGYFVNVNNTWMFTGSGYYYPEPITGNNVVVMSTCAVNYTKAPDVMLNISTPNLHDFKEELDQWFKNQTSVAPDLSLDYINVTFLDLQDEMNRLQEAIKVLNQSYINLKDIGTYEYYVKWPWYVWLLIGFAGVAMLVLLFFICCCTGCGTSCFKICGGCCDDYTGHQELVIKTSHDD

SEQ ID NO: 33 - protein, 1451 aa, canine coronavirus
  MISC_FEATURE: spike protein
MIVLTLCLFLFLYSSVSCTSNNDCVQVNVTQLPGNENIIKDFLFQNFKEEGSLVVGGYYPTEVWYNCSTTQQTTAYKYFSNIHAFYFDMEAMENSTGNARGKPLLVHVHGNPVSIIVYISAYRDDVQFRPLLKHGLLCITKNDTVDYNSFTINQWRDICLGDDRKIPFSVVPTDNGTKLFGLEWNDDYVTAYISDESHRLNINNNWFNNVTLLYSRTSTATWQHSAAYVYQGVSNFTYYKLNKTAGLKSYELCEDYEYCTGYATNVFAPTSGGYIPDGFSFNNWFMLTNSSTFVSGRFVTNQPLLVNCLWPVPSFGVAAQEFCFEGAQFSQCNGVSLNNTVDVIRFNLNFTTDVQSGMGATVFSLNTTGGVILEISCYNDTVSESSFYSYGEIPFGVTDGPRYCYVLYNGTALKYLGTLPPSVKEIAISKWGHFYINGYNFFSTFPIDCIAFNLTTGASGAFWTIAYTSYTEALVQVENTAIKKVTYCNSHINNIKCSQLTANLQNGFYPVASSEVGLVNKSVVLLPSFYSHTSVNITIDLGMKRSVTVTIASPLSNITLPMQDNNIDVYCIRSNQFSVYVHSTCKSSLWDNNFNSACTDVLDATAVIKTGTCPFSFDKLNNYLTFNKFCLSLNPVGANCKLDVAARTRTNEQVFGSLYVIYEEGDNIVGVPSDNSGLHDLSVLHLDSCTDYNIYGRTGVGIIRKTNSTLLSGLYYTSLSGDLLGFKNVSDGVVYSVTPCDVSAQAAVIDGAIVGAMTSINSELLGLTHWTTTPNFYYYSIYNYTNVMNRGTAIDNDIDCEPIITYSNIGVCKNGALVFINVTHSDGDVQPISTGNVTIPTNFTISVQVEYIQVYTTPVSIDCARYVCNGNPRCNKLLTQYVSACQTIEQALAMGARLENMEIDSMLFVSENALKLASVEAFNSTENLDPIYKEWPNIGGSWLGGLKDILPSHNSKRKYRSAIEDLLFDKVVTSGLGTVDEDYKRSAGGYDIADLVCARYYNGIMVLPGVANDDKMTMYTASLTGGITLGALSGGAVAIPFAVAVQARLNYVALQTDVLNKNQQILANAFNQAIGNITQAFGKVNDAIHQTSKGLATVAKALAKVQDVVNTQGQALSHLTVQLQNNFQAISSSISDIYNRLDELSADAQVDRLITGRLTALNAFVSQTLTRQAEVRASRQLAKDKVNECVRSQSQRFGFCGNGTHLFSLANAAPNGMIFFHTVLLPTAYETVTAWSGICASDGSRTFGLVVEDVQLTLFRNLDEKFYLTPRTMYQPRVATSSDFVQIEGCDVLFVNGTVIELPSIIPDYIDINQTVQDILENFRPNWTVPELPLDIFHATYLNLTGEINDLEFRSEKLHNTTVELAILIDNINNTLVNLEWLNRIETYVKWPWYVWLLIGLVVIFCIPILLFCCCSTGCCGCIGCLGSCCHSICSRGQFESYEPIEKVHVH

SEQ ID NO: 34 - protein, 1355 aa, EMCR Coronavirus; identical to SEQ ID NO: 3
  MISC_FEATURE: spike protein

SEQ ID NO: 35 - protein, 1452 aa, feline coronavirus
  MISC_FEATURE: spike protein
MIVLVTCLLLLCSYHTVLSTTNNECIQVNVTQLAGNENLIRDFLFSNFKEEGSVVVGGYYPTEVWYNCSRTARTTAFQYFNNIHAFYFVMEAMENSTGNARGKPLLFHVHGEPVSVIISAYRDDVQQRPLLKHGLVCITKNRHINYEQFTSNQWNSTCTGADRKIPFSVIPTDNGTKIYGLEWNDDFVTAYISGRSYHLNINTNWFNNVTLLYSRSSTATWEYSAAYAYQGVSNFTYYKLNNTNGLKTYELCEDYEHCTGYATNVFAPTSGGYIPDGFSFNNWFLLTNSSTFVSGRFVTNQPLLINCLWPVPSFGVAAQEFCFEGAQFSQCNGVSLNNTVDVIRFNLNFTADVQSGMGATVFSLNTTGGVILEISCYSDTVSESSSYSYGEIPFGITDGPRYCYVLYNGTALKYLGTLPPSVKEIAISKWGHFYINGYNFFSTFPIGCISFNLTTGVSGAFWTIAYTSYTEALVQVENTAIKNVTYCNSHINNIKCSQLTANLNNGFYPVASSEVGFVNKSVVLLPSFFTYTAVNITIDLGMKLSGYGQPIASTLSNITLPMQDNNTDVYCIRSNQFSVYVHSTCKSSLWDNIFNQDCTDVLEATAVIKTGTCPFSFDKLNNYLTFNKFCLSLSPVGANCKFDVAARTRTNEQVVRSLYVIYEEGDNIVGVPSDNSGLHDLSVLHLDSCTDYNIYGRTGVGIIRRTNSTLLSGLYYTSLSGDLLGFKNVSDGVIYSVTPCDVSAQAAVIDGAIVGAMTSINSELLGLTHWTTTPNFYYYSIYNYTSERTRGTAIDSNDVDCEPVITYSNIGVCKNGALVFINVTHSDGDVQPISTGNVTIPTNFTISVQVEYMQVYTTPVSIDCARYVCNGNPRCNKLLTQYVSACQTIEQALAMGARLENMEVDSMLFVSENALKLASVEAFNSTENLDPIYKEWPSIGGSWLGGLKDILPSHNSKRKYGSAIEDLLFDKVVTSGLGTVDEDYKRCTGGYDIADLVCAQYYNGIMVLPGVANADKMTMYTASLAGGITLGALGGGAVAIPFAVAVQARLNYVALQTDVLNKNQQILANAFNQAIGNITQAFGKVNDAIHQTSQGLATVAKALAKVQDVVNTQGQALSHLTVQLQNNFQAISSSISDIYNRLDELSADAQVDRLITGRLTALNAFVSQTLTRQAEVRASRQLAKDKVNECVRSQSQRFGFCGNGTHLFSLANAAPNGMIFFHTVLLPTAYETVTAWSGICASDGDRTFGLVVKDVQLTLFRNLDDKFYLTPRTMYQPRVATSSDFVQIEGCDVLFVNATVIDLPSIIPDYIDINQTVQDILENYRPNWTVPEFTLDIFNATYLNLTGEIDDLEFRSEKLHNTTVELAILIDNINNTLVNLEWLNRIETYVKWPWYVWLLIGLVVVFCIPLLLFCCFSTGCCGCIGCLGSCCHSICSRRQFENYEPIEKVHVH

SEQ ID NO: 36 - protein, 1361 aa, murine hepatitis virus
  MISC_FEATURE: spike protein
MLFVFLTLLPSSLGYIGDFRCIQLVNTDTSNASAPSVSTEVVDVSKGIGTYYVLDRVYLNATLLLTGYYPVDGSMYRNMALTGINTISLNWYKPPFLSEFNDGIFAKVKNLKASLPKDSISYFPTIIIGSNFVTTSYTVVLEPYNGIIMASICQYTICQLPYTDCKPNTGGNKLIGFWHTELKSPVCILKRNFTFNVNAEWLYFHFYQQGGTFYAYYADVSSATTFLFSMYIGDVLTQYFVLPYMCTLTTTGVFSPQYWVTPLVKRQYLFNFNQKGIITSAVDCASSYTSEIKCKTQSMNPNTGVYDLSGYTVQPVGLVYRRVRNLPDCKIEEWLTAKSVPSPLNWERKTFQNCNFDLSSLLRFVQAESLSCSNIDASKVYGMCFGSISIDKFAIPNRRRVDLQLGNSGFLQSFNYKIDTRATSCQLYYSLAKNNVTVNNHNPSSWNRRYGFNDVATFGTGKHDVAYAEACFTVGASYCPCANPSIVSPCTTGKPNFANCPTGTSNRECTVMPLANNQFKCDCTCNPSPLTTYDLRCLQARSMLGVGDHCEGLGVLEDKCGGSNTCNCSAHAFVGWAKDSCLANGRCHIFSNLMLNGINSGTTCSMDLQLPNTEVVTGVCVKYDLYGITGQGIFKEVKADYYHSWQNLLYDVNGNLIGFRDFVANKSYTIRSCYSGRVSAAYHQDAPEPALLYRNLKCDYVFNNNISREETPLNYFDSYLGCVVNADNSTEEAVDACDLRMGSGLCVNYSTSHRARSSVSTGYKLTTFEPFTVRIVNDSVESVDGLYELQIPTNFTIASHQEFVQTRSPKVTIDCAAFVCGGHTACRQQLVEYGSFCDNINAILGEVNNLIDTMQLQVASALIQGVTLSSRLSDGIGGQIDDINFSPLLGCLGSDCGEVTMAAQTGRSAIEDVLFDKVKLSDVGFVEAYNNCTGGQEVRDLLCVQSFNGIKVLPPVLSENQISGYTAGATVSAMFPWSAAAGVPFSLSVQYRINGLGVTMNVLSENQKMIASAFNNAIGAIQEGFAATNSALAKMQFVVNANAEALNNLLNQLSNRFGAISASLQEILSRLDALEAQAQIDRLINGRLTALNAYVSKQLSDMTLVKVSAAQAIEKVNECVKSQSSRINFCGNGNHILSLVQNAPYGLYFIHFSYVPTSFTTANVSPGLCISGDRGLAPKAGYFVQDDGEWKFTGSNYYYPEPITDKNSVVMSSCAANYTKAPEVFLNTSIPNLPDFKEELDKWFKNQTSIAPDLSLDFEKLNVTLLDLTDEMNRIQDAIKKLNESYINLKDVGTYEMYVKWPWYVWLLIGLAGVAVCVLLFFICCCTGCGSCCFKKCGNCCDECGGHQDSIVIHNISSHED

SEQ ID NO: 37 - protein, 1361 aa, human coronavirus OC43
  MISC_FEATURE: spike protein
MFLILLISLPTAFAVIGDLKCTSDTSYINDKDTGPPPISTDTVDVTNGLGTYYVLDRVYLNTTLFLNGYYPTSGSTYRNMALKGSVLLSRLWFKPPFLSDFINGIFAKVKNTKVIKDRVMYSEFPAITIGSTFVNTSYSVVVQPRTINSTQDGYNKLQGLLEVSVCQYNMCEYPQTICHPNLGNHRKELWHLDTGVVSCLYKRNFTYDVNADYLYFHFYQEGGTFYAYFTDTGVVTKFLFNVYLGMALSHYYVMPLTCNSKVKNGFTLEYWVTPLTSRQYLLAFNQDGIIFNAVDCMSDFMSEIKCKTQSIAPPTGVYELNGYTVQPIADVYRRKLNLPNCNIEAWLNDKSVPSPLNWERKTFSNCNFNMSSLMSFIQADSFTCNNIDAAKIYGMCFSSITIDKFAIPNGRKVDLQLGNLGYLQSFNYRIDTTATSCQLYYNLPAANVSVSRFNPSTWNKRFGFIEDSVFKPRPAGVLTNHDVVYAQHCFKAPKNFCPCKLNGSCVGSGPGKNNGIGTCPAGTNYLTCDNLCTPDPITFKATGTYKCPQTKSLVGIGEHCSGLAVKSDYCGGNSCTCRPQAFLGWSADSCLQGDKCNIFANFILHDVNSGLTCSTDLQKANTDIILGVCVNYDLYGILGQGIFVEVNATYYNSWQNLLYDSNGNLYGFRDYITNRTFMIRSCYSGRVSAAFHANSSEPALLFRNIKCNYVFNNSLTRQLQPINYFDSYLGCVVNAYNSTAISVQTCDLTVGSGYCVDYSKNRRSRGAITTGYRFTNFEPFTVNSVNDSLEPVGGLYEIQIPSEFTIGNMEEFIQTSSPKVTIDCAAFVCGDYAACKSQLVEYGSFCDNINAILTEVNELLDTTQLQVANSLMNGVTLSTKLKDGVNFNVDDINFSPVLGCLGSECSKASSRSAIEDLLFDKVKLSDVGFVEAYNNCTGGAEIRDLICVQSYKGIKVLPPLLSENQISGYTLAATSASLFPLWTAAAGVPFYLNVQYRINGLGVTMDVLSQNQKLIANAFNNALYAIQEGFDATNSALVKIQAVVNANAEALNNLLQQLSNRFGAISASLQEILSRLDALEAEAQIDRLINGRLTALNAYVSQQLSDSTLVKFSAAQAMEKVNECVKSQSSRINFCGNGNHIISLVQNAPYGLYFIHFSYVPTKYVTARVSPGLCIAGDRGIAPKSGYFVNVNNTWMYTGSGYYYPEPITENNVVVMSTCAVNYTKAPYVMLNTSIPNLPDFKEELDQWFKNQTSVAPDLSLDYINVTFLDLQVEMNRLQEAIKVLNQSYINLKDIGTYEYYVKWPWYVWLLICLAGVAMLVLLFFICCCTGCGTSCFKKCGGCCDDYTGYQELVIKTSHDD

SEQ ID NO: 38 - protein, 1383 aa, porcine epidemic diarhhea virus
  MISC_FEATURE: spike protein
MRSLIYFWLLLPVLPTLSLPQDVTRCQSTTNFRRFFSKFNVQAPAVVVLGGYLPSMNSSSWYCGTGIETASGVHGIFLSYIDSGQGFEIGISQEPFDPSGYQLYLHKATNGNTNAIARLRICQFPDNKTLGPTVNDVTTGRNCLFNKAIPAYMRDGKDIVVGITWDNDRVTVFADKIYHFYLKNDWSRVATRCYNRRSCAMQYVYTPTYYMLNVTSAGEDGIYYEPCTANCTGYAANVFATDSNGHIPEGFSFNNWFLLSNDSTLLHGKVVSNQPLLVNCLLAIPKIYGLGQFFSFNHTMDGVCNGAAVDRAPEALRFNINDTSVILAEGSIVLHTALGTNLSFVCSNSSDPHLAIFAIPLGATEVPYYCFLKVDTYNSTVYKFLAVLPPTVREIVITKYGDVYVNGFGYLHLGLLDAVTINFTGHGTDDDVSGFWTIASTNFVDALIEVQGTSIQRILYCDDPVSQLKCSQVAFDLDDGFYPISSRNLLSHEQPISFVTLPSFNDHSFVNITVSAAFGGLSSANLVASDTTINGFSSFCVDTRQFTITLFYNVTNSYGYVSKSQDSNCPFTLQSVNDYLSFSKFCVSTSLLAGACTIDLFGYPAFGSGVKLTSLYFQFTKGELITGTPKPLEGITDVSFMTLDVCTKYTIYGFKGEGIITLTNSSILAGVYYTSDSGQLLAFKNVTSGAVYSVTPCSFSEQAAYVNDDIVGVISSLSNSTFNNTRELPGFFYHSNDGSNCTEPVLVYSNIGVCKSGSIGYVPSQYGQVKIAPTVTGNISIPTNFSMSIRTEYLQLYNTPVSVDCATYVCNGNSRCKQLLTQYTAACKTIESALQLSARLESVEVNSMLTISEEALQLATISSFNGDGYNFTNVLGASVYDPASGRVVQKRSVIEDLLFNKVVTNGLGTVDEDYKRCSNGRSVADLVCAQYYSGVMVLPGVVDAEKLHMYSASLIGGMALGGITAAAALPFSYAVQARLNYLALQTDVLQRNQQLLAESFNSAIGNITSAFESVKEAISQTSKGLNTVAHALTKVQEVVNSQGSALNQLTVQLQHNFQAISSSIDDIYSRLDILSADVQVDRLITGRLSALNAFVAQTLTKYTEVQASRKLAQQKVNECVKSQSQRYGFCGGDGEHIFSLVQAAPQGLLFLHTVLVPGDFVNVLAIAGLCVNGEIALTLREPGLVLFTHELQTYTATEYFVSSRRMFEPRKPTVSDFVQIESCVVTYVNLTSDQLPDVIPDYIDVNKTLDEILASLPNRTGPSLPLDVFNATYLNLTGEIADLEQRSESLRNTTEELRSLINNINNTLVDLEWLNRVETYIKWPWWVWLIIVIVLIFVVSLLVFCCISTGCCGCCGCCGACFSGCCRGPRLQPYEAFEKVHVQ

SEQ ID NO: 39 - protein, 1349 aa, porcine haemagglutinating encephalomyelitis virus
  MISC_FEATURE: spike protein
MFFILLISLPSAFAVIGDLKCTTSLINDVDTGVPSISSEVVDVTNGLGTFYVLDRVYLNTTLLLNGYYPISGATFRNMALKGTRLLSTLWFKPPFLSPFNDGIFAKVKNSRFSKDGVIYSEFPAITIGSTFVNTSYSIVVEPHTSLINGNLQGLLQISVCQYTMCEYPHTICHPNLGNQRIELWHYDTDVVSCLYRRNFTYDVNADYLYFHFYQEGGTFYAYFTDTGFVTKFLFKLYLGTVLSHYYVMPLTCNSALSLEYWVTPLTTRQFLLAFDQDGVLYHAVDCASDFMSEIMCKTSSITPPTGVYELNGYTVQPVATVYRRIPDLPNCDIEAWLNSKTVSSPLNWERKIFSNCNFNMGRLMSFIQADSFGCNNIDASRLYGMCFGSITIDKFAIPNSRKVDLQVGKSGYLQSFNYKIDTAVSSCQLYYSLPAANVSVTHYNPSSWNRRYGFNNQSFGSRGLHDAVYSQQCFNTPNTYCPCRTSQCIGGAGTGTCPVGTTVRKCFAAVTKATKCTCWCQPDPSTYKGVNAWTCPQSKVSIQPGQHCPGLGLVEDDCSGNPCTCKPQAFIGWSSETCLQNGRCNIFANFILNDVNSGTTCSTDLQQGNTIITTDVCVNYDLYGITGQGILIEVNATYYNSWQNLLYDSSGNLYGFRDYLSNRTFLIRSCYSGRVSAVFHANSSEPALMFRNLKCSHVFNNTILRQIQLVNYFDSYLGCVVNAYNNTASAVSTCDLTVGSGYCVDYVTALRSRRSFTTGYRFTNFEPFAANLVNDSIEPVGGLYEIQIPSEFTIGNLEEFIQTRSPKVTIDCATFVCGDYAACRQQLAEYGSFCENINAILTEVNELLDTTQLQVANSLMNGVTLSTKIKDGINFNVDDINFSPVLGCLGSECNRASTRSAIEDLLFDKVKLSDVGFVQAYNNCTGGAEIRDLICVQSYNGIKVLPPLLSENQISGYTLAATAASLFPPWTAAAGVPFYLNVQYRINGLGVTMDVLSQNQKLIASAFNNALDAIQEGFDATNSALVKIQAVVNANAEALNNLLQQLSNRFGAISASLQEILSRLDALEAKAQIDRLINGRLTALNAYVSQQLSDSTLVKFSAAQAIEKVNECVKSQSSRINFCGNGNHIISLVQNAPYGLYFIHFSYVPTKYVTAKVSPGLCIAGDIGISPKSGYFINVNNSWMFTGSSYYYPEPITQNNVVVMSTCAVNYTKAPDLMLNTSTPNLPDFKEELYQWFKNQSSVAPDLSLDYINVTFLDLQDEMNRLQEAIKVLNQSYINLKDIGTYEYYVKWPWYVWLLIGLAGVAMLVLLFFICCCTGCGTSCFKKCGGCCDDYTGHQEFVIKTSHDD

SEQ ID NO: 40 - protein, 1225 aa, porcine respiratory coronavirus
  MISC_FEATURE: spike protein
MKKLFVVLVVMPLIYGDKFPTSVVSNCTDQCASYVANVFTILPGGFIPSDFSFNNWFLLTNSSTLVNGKLVTKQPLLVNCLWPVPSFEEVASTFCFEGADFDQCNGAVLNNTVDVIRFNLNFTTNVQSGKGATVFSLNTTGGVTLEISCYNDTVSDSSFSSYGEIPFGVTNGPRYCYVLYNGTALKYLGTLPPSVKEIAISKWGHFYINGYNFFSTFPIDCISFNLTTGDSDVFWTIAYTSYTEALVQVENTAITNVTYCNSYVNNIKCSQLTANLNNGFYPVSSSEVGSVNKSVVLLPSFLTHTIVNITIGLGMKRSGYGQPIASTLSNITLPMQDNNNDVYCVRSDQFSVYVHSTCKSVLWDNVFKRNCTDVLDATAVIKTGTCPFSFDKLNNYLTFNKFCLSLSPVGANCKFDVAARTRTNDQVVRSLYVIYEEGDSIVGVPSDNSGLHDLSVLHLDSCTDYNIYGRTGVGIIRQTNRTILSGLYYTSLSGDLLGFTNVSDGVIYSVTPCDVSAQAAIIDGTIVGAITSINSELLGLTHWTTTPNFYYYSIYNYTNDKTRGTPIGSNDVDCEPVITYSNIGVCKNGALVFINVTHSDGDVQPISTGNVTIPTNFTISVQVEYIQVYTTPVSIDCSRYVCNGNPRCNKLLTQYVSACQTIEQALAMGARLENMEVDSMLFVSENALKLASVEAFNSSETLDPIYKEWPNIGGFWLEGLKYILPSDNSKRKYRSAIEDLLFSKVVTSGLGTVDEDYKRCTGGYDIADLVCAQYYNGIMVLPGVANADKMTMYTASLAGGITLGALGGGAVAIPFAVAVQARLNYVALQTDVLNKNQQILASAFNQAIGNITQSFGKVNDAIHQTSRGLTTVAKALAKVQDVVNTQGQALRHLTVQLQNNFQAISSSISDIYNRLDELSADAQVDRLITGRLTALNAFVSQTLTRQAEVRASRQLAKDKVNECVRSQSQRFGFCGNGTHLFSLANAAPNGMIFFHTVLLPTAYETVTAWSGICALDVDRTFGLVVKDVQLTLFRNLDDKFYLTPRTMYQPRVATSSDFVQIEGCDVLFVNTTVSDLPSIIPDYIDINQTVQDILENFRPNWTVPELTLDVFNATYLNLTGEIDDLEFRSEKLHNTTVELAILIDNINNTVVNLEWLNRIETYVKWPWYVWLLIGLVVIFCIPLLLFCCCSTGCCGCIGCLGSCCHSIFSRRQFENYEPIEKVHVH

SEQ ID NO: 41 - protein, 1360 aa, rat coronavirus
  MISC_FEATURE: spike protein
MLFVFLTLLPSCLGYIGDFRCINLVNTRISNARAPSVSTEVVDVSKGLGTYYVLDRVYLNATLLLTGYYPVDGSMYRNMALMGTNTLSLNWFEPPFLSEFNDGIYAKVKNLKASLPIGSASYFPTIIIGSNFVNTSYTVVLEPYNGIIMASICQYTICQLPHTDCKPNTGGNTLIGFWHTDLRPPVCILKRNFTFNVNAEWLYFHFYQQGGTFYAYYADVSSATTFLFSSYIGAVLTQYFVLPYMCSPTTSGVSSPQYWVTPLVKRQYLFNFNQKGIITSAVDCASSYTSEIKCKTQSMNPNTGVYDLSGYTVQPVGLVYRRVRNLPDCKIEEWLAANTVPSPLNWERKTFQNCNFNLSSLLRFVQAESLSCSNIDASKVYGMCFGSISIDKFAIPNSRRVDLQLGKSGLLQSFNYKIDTRATSCQLYYSLAQDNVTVINHNPSSWNRRYGFNDVATFHSGEHDVAYAEACFTVGASYCPCAKPSTVYSCVTGKPKSANCPTGTSNRECNVQASGFKSKCDCTCNPSPLTTYDPRCLQARSMLGVGDHCEGLGILEDKCGGSNICNCSADAFVGWAMDSCLSNARCHIFSNLMLNGINSGTTCSTDFQLPNTEVVTGVCVKYDLYGSTGQGVFKEVKADYYNSWQNLLYDVNGNLNGFRDIVTNKTYLLRSCYSGRVSAAYHQDAPEPALLYRNLKCDYVFNNNISREETPLNYFDSYLGCVINADNSTEQSVDACDLRMGSGLCVNYSIAHRARRSVSTGYKLTTFEPFTVSIVNDSVESVGGLYEMQIPTNFTIASHQEFIQTRSPKVTIDCAAFVCGDYTACRQQLVDYGSFCDNINAILGEVNNLIDTMQLQVASALIQGVTLSSRLADGISGQIDDINFSPLLGCLGSDCSEGTKAAQGRSAIEDVLFDKVKLSDVGFVESYNNCTGGQEVRDLLCVQSFNGIKVLPPVLSESQISGYTAGATASAMFPPWSAAAGVPFALSVQYRINGLGVTMNVLSENQKMIASSFNNAIGAIQEGFDATNSALAKIQSVVNANAEALNNLLNQLSNRFGAISASLQEILSRLDALEAQAQIDRLINGRLTALNAYVSKQLSDMTLIKVSAAQAIEKVNECVKSQSPRINFCGNGNHILSLVQNAPYGLYFIHFSYVPTSFTTVNVSPGLCISGDRGLAPKAGYFVQDHGEWKFTGSNYYYPESITDKNSVVMSSCAVNYTKAPEVFLNTSITNLPDFKEELDKWFKNQTSIVPDLSFDIGKLNVTFLDLSYEMNRIQDAIKNLNESYINLKEIGTYEMYVKWPWYVWLLIGLAGVAVCVLLFFICCCTGCGSCCFKKCGNCCDEYGGRQAGIVIHNISSHED

SEQ ID NO: 42 - protein, 1255 aa, human SARS virus
  MISC_FEATURE: spike protein
MFIFLLFLTLTSGSDLDRCTTFDDVQAPNYTQHTSSMRGVYYPDEIFRSDTLYLTQDLFLPFYSNVTGFHTINHTFGNPVIPFKDGIYFAATEKSNVVRGWVFGSTMNNKSQSVIIINNSTNVVIRACNFELCDNPFFAVSKPMGTQTHTMIFDNAFNCTFEYISDAFSLDVSEKSGNFKHLREFVFKNKDGFLYVYKGYQPIDVVRDLPSGFNTLKPIFKLPLGINITNFRAILTAFSPAQDIWGTSAAAYFVGYLKPTTFMLKYDENGTITDAVDCSQNPLAELKCSVKSFEIDKGIYQTSNFRVVPSGDVVRFPNITNLCPFGEVFNATKFPSVYAWERKKISNCVADYSVLYNSTFFSTFKCYGVSATKLNDLCFSNVYADSFVVKGDDVRQIAPGQTGVIADYNYKLPDDFMGCVLAWNTRNIDATSTGNYNYKYRYLRHGKLRPFERDISNVPFSPDGKPCTPPALNCYWPLNDYGFYTTTGIGYQPYRVVVLSFELLNAPATVCGPKLSTDLIKNQCVNFNFNGLTGTGVLTPSSKRFQPFQQFGRDVSDFTDSVRDPKTSEILDISPCSFGGVSVITPGTNASSEVAVLYQDVNCTDVSTAIHADQLTPAWRIYSTGNNVFQTQAGCLIGAEHVDTSYECDIPIGAGICASYHTVSLLRSTSQKSIVAYTMSLGADSSIAYSNNTIAIPTNFSISITTEVMPVSMAKTSVDCNMYICGDSTECANLLLQYGSFCTQLNRALSGIAAEQDRNTREVFAQVKQMYKTPTLKYFGGFNFSQILPDPLKPTKRSFIEDLLFNKVTLADAGFMKQYGECLGDINARDLICAQKFNGLTVLPPLLTDDMIAAYTAALVSGTATAGWTFGAGAALQIPFAMQMAYRFNGIGVTQNVLYENQKQIANQFNKAISQIQESLTTTSTALGKLQDVVNQNAQALNTLVKQLSSNFGAISSVLNDILSRLDKVEAEVQIDRLITGRLQSLQTYVTQQLIRAAEIRASANLAATKMSECVLGQSKRVDFCGKGYHLMSFPQAAPHGVVFLHVTYVPSQERNFTTAPAICHEGKAYFPREGVFVFNGTSWFITQRNFFSPQIITTDNTFVSGNCDVVIGIINNTVYDPLQPELDSFKEELDKYFKNHTSPDVDLGDISGINASVVNIQKEIDRLNEVAKNLNESLIDLQELGKYEQYIKWPWYVWLGFIAGLIAIVMVTILLCCMTSCCSCLKGACSCGSCCKFDEDDSEPVLKGVKLHYT

SEQ ID NO: 43 - protein, 1173 aa, human coronavirus 229E
  MISC_FEATURE: spike protein
MFVLLVAYALLHIAGCQTTNGLNTSYSVCNGCVGYSENVFAVESGGYIPSDFAFNNWFLLTNTSSVVDGVVRSFQPLLLNCLWSVSGLRFTTGFVYFNGTGRGDCKGFSSDVLSDVIRYNLNFEENLRRGTILFKTSYGVVVFYCTNNTLVSGDAHIPFGTVLGNFYCFVNTTIGNETTSAFVGALPKTVREFVISRTGHFYINGYRYFTLGNVEAVNFNVTTAETTDFCTVALASYADVLVNVSQTSIANIIYCNSVINRLRCDQLSFDVPDGFYSTSPIQSVELPVSIVSLPVYHKHTFIVLYVDFKPQSGGGKCFNCYPAGVNITLANFNETKGPLCVDTSHFTTKYVAVYANVGRWSASINTGNCPFSFGKVNNFVKFGSVCFSLKDIPGGCAMPIVANWAYSKYYTIGSLYVSWSDGDGITGVPQPVEGVSSFMNVTLDKCTKYNIYDVSGVGVIRVSNDTFLNGITYTSTSGNLLGFKDVTKGTIYSITPCNPPDQLVVYQQAVVGAMLSENFTSYGFSNVVELPKFFYASNGTYNCTDAVLTYSSFGVCADGSIIAVQPRNVSYDSVSAIVTANLSIPSNWTTSVQVEYLQITSTPIVVDCSTYVCNGNVRCVELLKQYTSACKTIEDALRNSARLESADVSEMLTFDKKAFTLANVSSFGDYNLSSVIPSLPTSGSRVAGRSAIEDILFSKLVTSGLGTVDADYKKCTKGLSIADLACAQYYNGIMVLPGVADAERMAMYTGSLIGGIALGGLTSAVSIPFSLAIQARLNYVALQTDVLQENQKILAASFNKAMTNIVDAFTGVNDAITQTSQALQTVATALNKIQDVVNQQGNSLNHLTSQLRQNFQAISSSIQAIYDRLDTIQADQQVDRLITGRLAALNVFVSHTLTKYTEVRASRQLAQQKVNECVKSQSKRYGFCGNGTHIFSIVNAAPEGLVFLHTVLLPTQYKDVEAWSGLCVDGTNGYVLRQPNLALYKEGNYYRITSRIMFEPRIPTMADFVQIENCNVTFVNISRSELQTIVPEYIDVNKTLQELSYKLPNYTVPDLVVEQYNQTILNLTSEISTLENKSAELNYTVQKLQTLIDNINSTLVDLKWLNRVETYIKWPWWVWLCISVVLIFVVSMLLLCCCSTGCCGFFSCFASSIRGCCESTKLPYYDVEKIHIQ

SEQ ID NO: 44 - protein, 226 aa, EMCR coronvirus; identical to SEQ ID NO: 9
  MISC_FEATURE: ORF 4ab

SEQ ID NO: 45 - protein, 88 aa, human coronavirus 229E
  MISC_FEATURE: ORF 4b
MQGKCWFLENKALKPFVCFYGGDQFLYIGDRIVSYFSTNDLYVALRGRIDKDLSLSRKVELYNGECVYLFCEHPAVGIVNTDFKLEIH

SEQ ID NO: 46 - protein, 133 aa, human coronavirus 229E
  MISC_FEATURE: ORF 4a
MALGLFTLQLVSAVNQSLSNAKVSAEVSRQVIQDVKDGTVTFNLLAYTLMSLFVVYFALFKARSHRGRAALIVFKILILFVYVPLLYWSQAYIYATLIAVILLGRFFHTAWHCWLYKTWDFIVFNVTTLCYAR

SEQ ID NO: 47 - protein, 82 aa, transmissable gastroenteritis virus
  MISC_FEATURE: ORF E
MTFPRALTVIDDNGMVINIIFWFLLIIILILLSIALLNIIKLCMVCCNLGRTVIIVPAQHAYDAYKNFMRIKAYNPDGALLA

SEQ ID NO: 48 - protein, 108 aa, avian infectious bronchitis virus
  MISC_FEATURE: ORF E
MNLLNKSLEENGSFLTALYIIVGFLALYLLGRALQAFVQAADACCLFWYTWVVIPGAKGTAFVYKYTYGRKLNNPELEAVIVNEFPKNGWNNKNPANFQDAQRDKLYS

SEQ ID NO: 49 - protein, 84 aa, bovine coronavirus
  MISC_FEATURE: ORF E
MFMADAYFADTVWYVGQIIFIVAICLLVIIVVVAFLATFKLCIQLCGMCNTLVLSPSIYVFNRGRQFYEFYNDVKPPVLDVDDV

SEQ ID NO: 50 - protein, 82 aa, canine coronavirus
  MISC_FEATURE: ORF E
MTFPRALTVIDDNGMVISIIFWFLLIIILILFSIALLNIIKLCMVCCNLGRTVIIVPARHAYDAYKNFMQIRAYNPDEALLV

SEQ ID NO: 51 - protein, 77 aa, EMCR coronavirus; identical to SEQ ID NO: 4
  MISC_FEATURE: ORF E

SEQ ID NO: 52 - protein, 82 aa, feline coronavirus
  MISC_FEATURE: ORF E
MTFPRAFTIIDDHGMVVSVFFWLLLIIILILFSIALLNVIKLCMVCCNLGKTIIVLPARHAYDAYKTFMQTKAYNPDEAFLV

SEQ ID NO: 53 - protein, 88 aa, murine hepatitis virus
  MISC_FEATURE: ORF E
MFNLFLTDTVWYVGQIIFIVAVCLMVTIIVVAFLASIKLCIQLCGLCNTLLLSPSICVYNRSKQLYKYYNEEVRPPPLEVDDIIIQTL

SEQ ID NO: 54 - protein, 84 aa, human coronavirus OC43
  MISC_FEATURE: ORF E
MFMADAYLADTVWYVGQIIFIVAICLLVTIVVVAFLATFKLCIQLCGMCNTLVLSPSIYVFNRGRQFYEFYNDVKPPVLDVDDV

SEQ ID NO: 55 - protein, 76 aa, porcine epidemic diarrhea virus
  MISC_FEATURE: ORF E
MLQLVNDNGLVVNVILWLFVLFFLLIISITFVQLVNLCFTCHRLCNSAVYTPIGRLYRVYKSYMRIDPLPSTVIDV

SEQ ID NO: 56 - protein, 84 aa, porcine haemagglutinating encephalomyelitis virus
  MISC_FEATURE: ORF E
MFMADAYLADTVWYVGQIIFIVAICLLVIIVVVAFLATFKLCIQLCGMCNTLVLSPSIYVFNRGRQFYEFYNDVKPPVLDVDDV

SEQ ID NO: 57 - protein, 82 aa, porcine respiratory coronavirus
  MISC_FEATURE: ORF E
MTFPRALTVIDDNGMVISIIFWFLLIIILILLSIALLNIIKLCMVCCNLGRTVIIVPVQHAYDAYKNFMRIKAYNPDGALLV

SEQ ID NO: 58 - protein, 88 aa, rat coronavirus
  MISC_FEATURE: ORF E
MFNLFLIDTVWYVGQIIFIVAVCLMVTIIVVAFLASIKLCIQLCGLCNTLLLSPSIYVYNRSKQLYKYYNEEVRPPPLEVDDIIIQTL

SEQ ID NO: 59 - protein, 76 aa, human SARS virus
  MISC_FEATURE: ORF E
MYSFVSEETGTLIVNSVLLFLAFVVFLLVTLAILTALRLCAYCCNIVNVSLVKPTVYVYSRVKNLNSSEGVPDLLV

SEQ ID NO: 60 - protein, 77 aa, human coronavirus 229E
  MISC_FEATURE: ORF E
MFLKLVDDHALVVNVLLWCVVLIVILLVCITIIKLIKLCFTCHMFCNRTVYGPIKNVYHIYQSYMHIDPFPKRVIDF

SEQ ID NO: 61 - protein, 262 aa, transmissible gastroenteritis virus
  MISC_FEATURE: ORF M
MKILLILACVIACACGERYCAMKSDTDLSCRNSTASDCESCFNGGDLIWHLANWNFSWSIILIVFITVLQYGRPQFSWFVYGIKMLIMWLLWPVVLALTIFNAYSEYQVSRYVMFGFSIAGAIVTFVLWIMYFVRSIQLYRRTKSWWSFNPETKAILCVSALGRSYVLPLEGVPTGVTLTLLSGNLYAEGFKIAGGMNIDNLPKYVMVALPSRTIVYTLVGKKLKASSATGWAYYVKSKAGDYSTEARTDNLSEQEKLLHMV

SEQ ID NO: 62 - protein, 225 aa, avian infectious bronchitis virus
  MISC_FEATURE: ORF M
MPNETNCTLDFEQSVQLFKEYNLFITAFLLFLTIILQYGYATRSKVIYTLKMIVLWCFWPLNIAVGVISCTYPPNTGGLVAAIILTVFACLSFVGYWIQSIRLFKRCRSWWSFNPESNAVGSILLTNGQQCNFAIESVPMVLSPIIKNGVLYCEGQWLAKCEPDHLPKDIFVCTPDRRNIYRMVQKYTGDQSGNKKRFATFVYAKQSVDTGELESVATGGSSLYT

SEQ ID NO: 63 - protein, 230 aa, bovina coronavirus
  MISC_FEATURE: ORF M
MSSVTTPAPVYTWTADEAIKFLKEWNFSLGIILLFITIILQFGYTSRSMFVYVIKMIILWLMWPLTIILTIFNCVYALNNVYLGFSIVFTIVAIIMWIVYFVNSIRLFIRTGSWWSFNPETNNLMCIDMKGRMYVRPIIEDYHTLTVTIIRGHLYMQGIKLGTGYSLSDLPAYVTVAKVSHLLTYKRGFLDKIGDTSGFAVYVKSKVGNYRLPSTQKGSGMDTALLRNNI

SEQ ID NO: 64 - protein, 262 aa, canine coronavirus
  MISC_FEATURE: ORF M
MKKILFLLACAIACVYGERYCAMTESSTSCRNSTAGNCASCFETGDLIWHLANWNFSWSVILIIFITVLQYGRPQFSWFVCGIKMLIMWLLWPIVLALTIFNAYLEYRVSRYVMFGFSVAGATVTFILWIMYFVRSIQLYRRTKSWWSFNPETSAILCVSALGRSYVLPLEGVPTGVTLTLLSGNLCAEGFKIAGGMNIDNLPKYVMVALPVRTIVYTLVGKKLKASSATGWAYYVKSKAGDYSTDARTDNLSEHEKLLHMV

SEQ ID NO: 65 - protein, 226 aa, EMCR coronavirus; identical to SEQ ID NO: 5
  MISC_FEATURE: ORF M

SEQ ID NO: 66 - protein, 289 aa, feline coronavirus
  MISC_FEATURE: ORF M
MHMMPIRPLCKPRHIIPTKHFWFELNKMKYILLILACIIACVYGERYCAMQDSGLQCINGTNSRCQTCFERGDLIWHLANWNFSWSVILIVFITVLQYGRPQFSWLVYGIKMLIMWLLWPIVLALTIFNAYSEYQVSRYVMFGFSVAGAVVTFALWMMYFVRSVQLYRRTKSWWSFNPETNAILCVNALGRSYVLPLDGTPTGVTLTLLSGNLYAEGFKMAGGLTIEHLPKYVMIATPSRTIVYTLVGKQLKATTATGWAYYVKSKAGDYSTEARTDNLSEHEKLLHMV

SEQ ID NO: 67 - protein, 228 aa, murine hepatitis virus
  MISC_FEATURE: ORF M
MTSTTQAPQPVYQWTADEAIRFLKEWNFSLGIILLFVTIILQFGYTSRSMFVYVVKMILLWLMWPLTIVLCIFNCVYALNNVYLGFSIVFTIVSIIMWIMYFVNSIRLFIRTGSWWSFNPETNNLMCIDMKGTVYVRPIIEDYHTLTATIIRGHLYMQGVKLGTGFSLSDLPAYVTVAKVSHLCTYKRAFLDKVDGVSGFAVYVKSKVGNYRLPSNKPSGMDTALLRI

SEQ ID NO: 68 - protein, 230 aa, human coronavirus OC43
  MISC_FEATURE: ORF M
MSSKTTPAPVYIWTADEAIKFLKEWNFSLGIILLFITIILQFGYTSRSMFVYVIKMIILWLMWPLTIILTIFNCVYALNNVYLGLSIVFTIVAIIMWIVYFVNSIRLFIRTGSFWSFNPETNNLMCIDMKGTMYVRPIIEDYHTLTVTIIRGHLYIQGIKLGTGYSLADLPAYMTVAKVTHLCTYKRGFLDRISDTSGFAVYVKSKVGNYRLPSTQKGSGMDTALLRNNI

SEQ ID NO: 69 - protein, 226 aa, porcine epidemic diarrhea virus
  MISC_FEATURE: ORF M
MSNGSIPVDEVIEHLRNWNFTWNIILTILLVVLQYGHYKYSVFLYGVKMAILWILWPLVLALSLFDAWASFQVNWVFFAFSILMACITLMLWIMYFVNSIRLWRRTHSWWSFNPETDALLTTSVMGRQVCIPVLGAPTGVTLTLLSGTLLVEGYKVATGVQVSQLPNFVTVAKATTTIVYGRVGRSVNASSGTGWAFYVRSKHGDYSAVSNPSAVLTDSEKVLHLV

SEQ ID NO: 70 - protein, 230 aa, porcine haemagglutinating encephalomyelitis virus
  MISC_FEATURE: ORF M
MSSPTTPVPVISWTADEAIKFLKEWNFSLGIIVLFITIILQFGYTSRSMFVYVIKMVILWLMWPLTIILTIFNCVYALNNVYLGFSIVFTIVAIIMWVVYFVNSIRLFIRTGSWWSFNPETNNLMCIDMKGRMYVRPIIEDYHTLTATIIRGHLYIQGIKLGTGYSLSDLPAYVTVAKVTHLCTYKRGFLDRIGDTSGFAVYVKSKVGNYRLPSTHKGSGMDTALLRNNI

SEQ ID NO: 71 - protein, 262 aa, porcine respiratory coronavirus
  MISC_FEATURE: ORF M
MKILLILACAIACTCGERYCAMKDDTGLSCRNGTASDCESCFNRGDLIWLLANWNFSWSIILIIFITVLQYGRPQFSWFVYGIKMLIMWLLWPIVLALTIFNAYSEYQVSRYVMFGFSIAGAIVTFVLWIMYFVRSIQLYRRTKSWWSFNPETNAILCVSALGRSYVLPLEGVPTGVTLTLLSGNLYAEGFKIAGGMTIDNLPKYVMVALPSRTIVYTLVGKKLKASSATGWAYYVKSKAGDYSTEARTDNLSEQEKLLHMV

SEQ ID NO: 72 - protein, 228 aa, rat coronavirus
  MISC_FEATURE: ORF M
MSSTTPAPQTVYQWTADVAVRFLKEWNFLLGIILLFITIILQFGYTSRSMFIYVVKMIILWLMWPLTIVLCIFNCVYALNNVYLGFSIVFTIVSIVMWIMYFVNSIRLFIRTGSWWSFNPETNNLMCIDVKGTVYVRPIIEDYHTLTATNVRGHLYMQGVKLGTGFSLSDLPAYVTVAKVSHLCTYKRAFLDKVDGVSGFAVYVKSKVGNYRLPSNKPSGADTALLRI

SEQ ID NO: 73 - protein, 221 aa, human SARS virus
  MISC_FEATURE: ORF M
MADNGTITVEELKQLLEQWNLVIGFLFLAWIMLLQFAYSNRNRFLYIIKLVFLWLLWPVTLACFVLAAVYRINWVTGGIAIAMACIVGLMWLSYFVASFRLFARTRSMWSFNPETNILLNVPLRGTIVTRPLMESELVIGAVIIRGHLRMAGHPLGRCDIKDLPKEITVATSRTLSYYKLGASQRVGTDSGFAAYNRYRIGNYKLNTDHAGSNDNIALLVQ

SEQ ID NO: 74 - protein, 225 aa, human coronavirus 229E
  MISC_FEATURE: ORF M
MSNDNCTGDIVTHLKNWNFGWNVILTIFIVILQFGHYKYSRLFYGLKMLVLWLLWPLVLALSIFDTWANWDSNWAFVAFSFFMAVSTLVMWVMYFANSFRLFRRARTFWAWNPEVNAITVTTVLGQTYYQPIQQAPTGITVTLLSGVLYVDGHRLASGVQVHNLPEYMTVAVPSTTIIYSRVGRSVNSQNSTGWVFYVRVKHGDFSAVSSPMSNMTENERLLHFF

SEQ ID NO: 75 - protein, 382 aa, transmissible gastroenteritis virus
  MISC_FEATURE: ORF N
MANQGQRVSWGDESTKTRGRSNSRGRKNNNIPLSFFNPITLQQGSKFWNLCPRDFVPKGIGNRDQQIGYWNRQTRYRMVKGQRKELPERWFFYYLGTGPHADAKFKDKLDGVVWVAKDGAMNKPTTLGSRGANNESKALKFDGKVPGEFQLEVNQSRDNSRSRSQSRSRSRNRSQSRGRQQFNNKKDDSVEQAVLAALKKLGVDTEKQQQRSRSKSKERSNSKTRDTTPKNENKHTWKRTAGKGDVTRFYGARSSSANFGDTDLVANGSSAKHYPQLAECVPSVSSILFGSYWTSKEDGDQIEVTFTHKYHLPKDDPKTGQFLQQINAYARPSEVAKEQRKRKSRSKSAERSEQDVVPDALIENYTDVFDDTQVEIIDEVTN

SEQ ID NO: 76 - protein, 381 aa, canine coronavirus
  MISC_FEATURE: ORF N
MASQGQRVSWGDESTKRRGRSNSRGRKNNDIPLSFFNPITLEQGSKFWDLCPRDFVPKGIGNKDQQIGYWNRQTRYRMVKGRRKNLPEKWFFYYLGTGPHADAKFKQKLDGVVWVARGDSMTKPTTLGTRGTNNESKALKFDVKVPSEFHLEVNQLRDNSRSRSQSRSQSRNRSQSRGRQLSNNKKDDNVEQAVLAALKKLGVDTEKQQRSRSKSKERSSSKTRDTTPKNENKHTWKRTAGKGDVTKFYGARSSSANFGDSDLVANGNGAKHYPQLAECVPSVSSILFGSHWTAKEDGDQIEVTFTHKYHLPKDDPKTGQFLQQINAYARPSEVAKEQRQRKARSKSVERVEQEVVPDALTENYTDVFDDTQVEIIDEVTN

SEQ ID NO: 77 - protein, 377 aa, EMCR coronavirus; identical to SEQ ID NO: 6
  MISC_FEATURE: ORF N

SEQ ID NO: 78 - protein, 377 aa, feline coronavirus
  MISC_FEATURE: ORF N
MATQGQRVNWGDEPSKRRGRSNSRGRKNNDIPLSFYNPITLEQGSKFWNLCPRDLVPKGIGNKDQQIGYWNRQIRYRIVKGQRKELAERWFFYFLGTGPHADAKFKDKIDGVFWVARDGAMNKPTTLGTRGTNNESKPLRFDGKIPPQFQLEVNRSRNNSRSGSQSRSVSRNRSQSRGRHHSNNQNNNVEDTIVAVLEKLGVTDKQRSRSKPRERSDSKPRDTTPKNANKHTWKKTAGKGDVTTFYGARSSSANFGDSDLVANGNAAKCYPQIAECVPSVSSIIFGSQWSAEEAGDQVKVTLTHTYYLPKDDAKTSQFLEQIDAYKRPSEVAKDQRQRRSRSKSADKKPEELSVTLVEAYTDVFDDTQVEMIDEVTN

SEQ ID NO: 79 - protein, 441 aa, porcine epidemic diahrrea virus
  MISC_FEATURE: ORF N
MASVSFQDRGRKRVPLSLYAPLRVTNDKPLSKVLANNAVPTNKGNKDQQIGYWNEQIRWRMRRGERIEQPSNWHFYYLGTGPHGDLRYRTRTEGVFWVAKEGAKTEPTNLGVRKASEKPIIPKFSQQLPSVVEIVEPNTPPASRANSRSRSRGNGNNRSRSPSNNRGNNQSRGNSQNRGNNQGRGASQNRGGNNNNNNKSRNQSNNRNQSNDRGGVTSRDDLVAAVKDALKSLGIGENPDRHKQQQKPKQEKSDNSGKNTPKKNKSRATSKERDLKDIPEWRRIPKGENSVAACFGPRGGFKNFGDAEFVEKGVDASGYAQIASLAPNVAALLFGGNVAVRELADSYEITYNYKMTVPKSDPNVELLVSQVDAFKTGNAKLQRKKEKKNKRETTLQQHEEAIYDDVGAPSDVTHANLEWDTAVDGGDTAVEIINEIFDTGN

SEQ ID NO: 80 - protein, 382 aa, porcine respiratory coronavirus
  MISC_FEATURE: ORF N
MANQGQRVSWGDESTKIRGRSNSRGRKINNIPLSFFNPITLQQGAKFWNSCPRDFVPKGIGNRDQQIGYWNRQTRYRMVKGQRKELPERWFFYYLGTGPHADAKFKDKLDGVVWVAKDGAMNKPTTLGSRGANNESKALKFDGKVPGEFQLEVNQSRDNSRSRSQSRSRSRNRSQSRGRQQSNNKKDDSVEQAVLAALKKLGVYTEKQQQRSRSKSKERSNSKTRDTTPKNENKHTWKRTAGKGDVTRFYGARSSSANFGDSDLVANGSSAKHYPQLAECVPSVSSILFGSYWTSKEDGDQIEVTFTHKYHLPKDHPKTEQFLQQINAYASPSELAKEQRKRKSRSKSAERSEQEVVPDSLIENYTDVFDDTQVEMIDEVTN

SEQ ID NO: 81 - protein, 454 aa, rat coronavirus
  MISC_FEATURE: ORF N
MSFVPGQENAGSRSSSGNRAGNGILKKTTWADQTERGQNNGNRGRRNQPKQTATTQPNTGSVVPHYSWFSGITQFQKGKEFQFAGGQGVPIANGIPPSEQKGYWYRHNRRSFKTPDGQQKQLLPRWYFYYLGTGPHAGASFGDSIEGVFWVANSQADTNTSADIVERDPSSHEAIPTRFAPGTVLPQGFYVEGSGRSAPASRSGSRSQSRGPNNRARSSSNQRQPASTVKPDMAEEIAALVLANLGKDAGQPKQVTKQSAKEVRQKILNKPRQKRTPNKQCPVQQCFGKRGPNQNFGGPEMLKLGTSDPQFPILAELAPTPGAFFFGSKLELVKKNSGGVDEPTKDVYELQYSGAVRFDSTLPGFETIMKVLNENLNAYQNQAGGADVVSPKPQRKRGTKQTAQKEELDSISVAKPKSAVQRNVSRELTPEDRSLLAQILDDGVVPDGLDDSNV

SEQ ID NO: 82 - protein, 389 aa, human coronavirus 229E
  MISC_FEATURE: ORF N
MATVKWADASEPQRGRQGRIPYSLYSPLLVDSEQPWKVIPRNLVPINKKDKNKLIGYWNVQKRFRTRKGKRVDLSPKLHFYYLGTGPHKDAKFRERVEGVVWVAVDGAKTEPTGYGVRRKNSEPEIPHFNQKLPNGVTVVEEPDSRAPSRSQSRSQSRGRGESKPQSRNPSSDRNHNSQDDIMKAVAAALKSLGFDKPQEKDKKSAKTGTPKPSRNQSPASSQTSAKSLARSQSSETKEQKHEMQKPRWKRQPNDDVTSNVTQCFGPRDLDHNFGSAGVVANGVKAKGYPQFAELVPSTAAMLFDSHIVSKESGNTVVLTFTTRVTVPKDHPHLGKFLEELNAFTREMQQHPLLNPSALEFNPSQTSPATAEPVRDEVSIETDIIDEVN

SEQ ID NO: 83 - DNA, 264 bp, EMCR Coronavirus
  5'UTR (1)..(264)
agatagagaattttcttatttagactttgtgtctactcctctcaactaaacgaaatttttctagtgctgtcatttgttatggcagtcctagtgtaattgaaatttcgtcaagtttgtaaactggttaggcaagtgttgtattttctgtgtttaagcactggtggttctgtccactagtgcacacattgatacttaagtggtgttctgtcactgcttattgtggaagcaacgttctgtcgttgtggaaaccaataactgctaacc

SEQ ID NO: 84 - protein, 2685 aa, human SARS virus
  MISC_FEATURE: ORF 1B
TPCGTGTSTDVVYRAFDIYNEKVAGFAKFLKTNCCRFQEKDEEGNLLDSYFVVKRHTMSNYQHEETIYNLVKDCPAVAVHDFFKFRVDGDMVPHISRQRLTKYTMADLVYALRHFDEGNCDTLKEILVTYNCCDDDYFNKKDWYDFVENPDILRVYANLGERVRQSLLKTVQFCDAMRDAGIVGVLTLDNQDLNGNWYDFGDFVQVAPGCGVPIVDSYYSLLMPILTLTRALAAESHMDADLAKPLIKWDLLKYDFTEERLCLFDRYFKYWDQTYHPNCINCLDDRCILHCANFNVLFSTVFPPTSFGPLVRKIFVDGVPFVVSTGYHFRELGVVHNQDVNLHSSRLSFKELLVYAADPAMHAASGNLLLDKRTTCFSVAALTNNVAFQTVKPGNFNKDFYDFAVSKGFFKEGSSVELKHFFFAQDGNAAISDYDYYRYNLPTMCDIRQLLFVVEVVDKYFDCYDGGCINANQVIVNNLDKSAGFPFNKWGKARLYYDSMSYEDQDALFAYTKRNVIPTITQMNLKYAISAKNRARTVAGVSICSTMTNRQFHQKLLKSIAATRGATVVIGTSKFYGGWHNMLKTVYSDVETPHLMGWDYPKCDRAMPNMLRIMASLVLARKHNTCCNLSHRFYRLANECAQVLSEMVMCGGSLYVKPGGTSSGDATTAYANSVFNICQAVTANVNALLSTDGNKIADKYVRNLQHRLYECLYRNRDVDHEFVDEFYAYLRKHFSMMILSDDAVVCYNSNYAAQGLVASIKNFKAVLYYQNNVFMSEAKCWTETDLTKGPHEFCSQHTMLVKQGDDYVYLPYPDPSRILGAGCFVDDIVKTDGTLMIERFVSLAIDAYPLTKHPNQEYADVFHLYLQYIRKLHDELTGHMLDMYSVMLTNDNTSRYWEPEFYEAMYTPHTVLQAVGACVLCNSQTSLRCGACIRRPFLCCKCCYDHVISTSHKLVLSVNPYVCNAPGCDVTDVTQLYLGGMSYYCKSHKPPISFPLCANGQVFGLYKNTCVGSDNVTDFNAIATCDWTNAGDYILANTCTERLKLFAAETLKATEETFKLSYGIATVREVLSDRELHLSWEVGKPRPPLNRNYVFTGYRVTKNSKVQIGEYTFEKGDYGDAVVYRGTTTYKLNVGDYFVLTSHTVMPLSAPTLVPQEHYVRITGLYPTLNISDEFSSNVANYQKVGMQKYSTLQGPPGTGKSHFAIGLALYYPSARIVYTACSHAAVDALCEKALKYLPIDKCSRIIPARARVECFDKFKVNSTLEQYVFCTVNALPETTADIVVFDEISMATNYDLSVVNARLRAKHYVYIGDPAQLPAPRTLLTKGTLEPEYFNSVCRLMKTIGPDMFLGTCRRCPAEIVDTVSALVYDNKLKAHKDKSAQCFKMFYKGVITHDVSSAINRPQIGVVREFLTRNPAWRKAVFISPYNSQNAVASKILGLPTQTVDSSQGSEYDYVIFTQTTETAHSCNVNRFNVAITRAKIGILCIMSDRDLYDKLQFTSLEIPRRNVATLQAENVTGLFKDCSKIITGLHPTQAPTHLSVDIKFKTEGLCVDIPGIPKDMTYRRLISMMGFKMNYQVNGYPNMFITREEAIRHVRAWIGFDVEGCHATRDAVGTNLPLQLGFSTGVNLVAVPTGYVDTENNTEFTRVNAKPPPGDQFKHLIPLMYKGLPWNVVRIKIVQMLSDTLKGLSDRVVFVLWAHGFELTSMKYFVKIGPERTCCLCDKRATCFSTSSDTYACWNHSVGFDYVYNPFMIDVQQWGFTGNLQSNHDQHCQVHGNAHVASCDAIMTRCLAVHECFVKRVDWSVEYPIIGDELRVNSACRKVQHMVVKSALLADKFPVLHDIGNPKAIKCVPQAEVEWKFYDAQPCSDKAYKIEELFYSYATHHDKFTDGVCLFWNCNVDRYPANAIVCRFDTRVLSNLNLPGCDGGSLYVNKHAFHTPAFDKSAFTNLKQLPFFYYSDSPCESHGKQVVSDIDYVPLKSATCITRCNLGGAVCRHHANEYRQYLDAYNMMISAGFSLWIYKQFDTYNLWNTFTRLQSLENVAYNVVNKGHFDGHAGEAPVSIINNAVYTKVDGIDVEIFENKTTLPVNVAFELWAKRNIKPVPEIKILNNLGVDIAANTVIWDYKREAPAHVSTIGVCTMTDIAKKPTESACSSLTVLFDGRVEGQVDLFRNARNGVLITEGSVKGLTPSKGPAQASVNGVTLIGESVKTQFNYFKKVDGIIQQLPETYFTQSRDLEDFKPRSQMETDFLELAMDEFIQRYKLEGYAFEHIVYGDFSHGQLGGLHLMIGLAKRSQDSPLKLEDFIPMDSTVKNYFITDAQTGSSKCVCSVIDLLLDDFVEIIKSQDLSVISKVVKVTIDYAEISFMLWCKDGHVETFYPKLQASQAWQPGVAMPNLYKMQRMLLEKCDLQNYGENAVIPKGIMMNVAKYTQLCQYLNTLTLAVPYNMRVIHFGAGSDKGVAPGTAVLRQWLPTGTLLVDSDLNDFVSDADSTLIGDCATVHTANKWDLIISDMYDPRTKHVTKENDSKEGFFTYLCGFIKQKLALGGSIAVKITEHSWNADLYKLMGHFSWWTAFVTNVNASSSEAFLIGANYLGKPKEQIDGYTMHANYIFWRNTNPIQLSSYSLFDMSKFPLKLRGTAVMSLKENQINDMIYSLLEKGRLIIRENNRVVVSSDILVNN

SEQ ID NO: 85 - protein, 2652 aa, avian infectious bronchitis virus
  MISC_FEATURE: ORF 1B
MFQNLKRNCARFQELRDTEDGNLEYLDSYFVVKQTTPSNYEHEKSCYEDLKSEVTADHDFFVFNKNIYNISRQRLTKYTMMDFCYALRHFDPKDCEVLKEILVTYGCIEDYHPKWFEENKDWYDPIENSKYYVMLAKMGPIVRRALLNAIEFGNLMVEKGYVGVITLDNQDLNGKFYDFGDFQKTAPGAGVPVFDTYYSYMMPIIAMTDALAPERYFEYDVHKGYKSYDLLKYDYTEEKQELFQKYFKYWDQEYHPNCRDCSDDRCLIHCANFNILFSTLIPQTSFGNLCRKVFVDGVPFIATCGYHSKELGVIMNQDNTMSFSKMGLSQLMQFVGDPALLVGTSNNLVDLRTSCFSVCALTSGITHQTVKPGHFNKDFYDFAEKAGMFKEGSSIPLKHFFYPQTGNAAINDYDYYRYNRPTMFDICQLLFCLEVTSKYFECYEGGCIPASQVVVNNLDKSAGYPFNKFGKARLYYEMSLEEQDQLFEITKKNVLPTITQMNLKYAISAKNRARTVAGVSILSTMTNRQFHQKILKSIVNTRNASVVIGTTKFYGGWDNMLRNLIQGVEDPILMGWDYPKCDRAMPNLLRIAASLVLARKHTNCCSWSERIYRLYNECAQVLSETVLATGGIYVKPGGTSSGDATTAYANSVFNIIQATSANVARLLSVITRDIVYDNIKSLQYELYQQVYRRVNFDPAFVEKFYSYLCKNFSLMILSDDGVVCYNNTLAKQGLVADISGFREVLYYQNNVFMADSKCWVEPDLEKGPHEFCSQHTMLVEVDGEPKYLPYPDPSRILGACVFVDDVDKTEPVAVMERYIALAIDAYPLVHHENEEYKKVFFVLLAYIRKLYQELSQNMLMDYSFVMDIDKGSKFWEQEFYENMYRAPTTLQSCGVCVVCNSQTILRCGNCIRKPFLCCKCCYDHVMHTDHKNVLSINPYICSQLGCGEADVTKLYLGGMSYFCGNHKPKLSIPLVSNGTVFGIYRANCAGSENVDDFNQLATTNWSIVEPYILANRCSDSLRRFAAETVKATEELHKQQFASAEVREVFSDRELILSWEPGKTRPPLNRNYVFTGYHFTRTSKVQLGDFTFEKGEGKDVVYYKATSTAKLSVGDIFVLTSHNVVSLVAPTLCPQQTFSRFVNLRPNVMVPECFVNNIPLYHLVGKQKRTTVQGPPGSGKSHFAIGLAVYFSSARVVFTACSHAAVDALCEKAFKFLKVDDCTRIVPQRTTVDCFSKFKANDTGKKYIFSTINALPEVSCDILLVDEVSMLTNYELSFINGKINYQYVVYVGDPAQLPAPRTLLNGSLSPKDYNVVTNLMVCVKPDIFLAKCYRCPKEIVDTVSTLVYDGKFIANNPESRECFKVIVNNGNSDVGHESGSAYNTTQLEFVKDFVCRNKQWREAIFISPYNAMNQRAYRMLGLNVQTVDSSQGSEYDYVIFCVTADSQHALNINRFNVALTRAKRGILVVMRQRDELYSALKFTELDSETSLQGTGLFKICNKEFSGVHPAYAVTTKALAATYKVNDELAALVNVEAGSEITYKHLISLLGFKMSVNVEGCHNMFITRDEAIRNVRGWVGFDVEATHACGTNIGTNLPFQVGFSTGADFVVTPEGLVDTSIGNNFEPVNSKAPPGEQFNHLRVLFKSAKPWHVIRPRIVQMLADNLCNVSDCVVFVTWCHGLELTTLRYFVKIGKEQVCSCGSRATTFNSHTQAYACWKHCLGFDFVYNPLLVDIQQWGYSGNLQFNHDLHCNVHGHAHVASVDAIMTRCLAINNAFCQDVNWDLTYPHIANEDEVNSSCRYLQRMYLNACVDALKVNVVYDIGNPKGIKCVRRGDVNFRFYDKNPIVRNVKQFEYDYNQHKDKFADGLCMFWNCNVDCYPDNSLVCRYDTRNLSVFNLPGCNGGSLYVNKHAFYTPKFDRISFRNLKAMPFFFYDSSPCETIQVDGVAQDLVSLATKDCITKCNIGGAVCKKHAQMYAEFVTSYNAAVTAGFTFWVTNKLNPYNLWKSFSALQSIDNIAYNMYKGGHYDAIAGEMPTVITGDKVFVIDQGVEKAVFVNQTTLPTSVAFELYAKRNIRTLPNNRILKGLGVDVTNGFVIWDYANQTPLYRNTVKVCAYTDIEPNGLVVLYDDRYGDYQSFLAADNAVLVSTQCYKRYSYVEIPSNLLVQNGMPLKDGANLYVYKRVNGAFVTLPNTINTQGRSYETFEPRSDIERDFLAMSEESFVERYGKDLGLQHILYGEVDKPQLGGLHTVIGMYRLLRANKLNAKSVTNSDSDVMQNYFVLSDNGSYKQVCTVVDLLLDDFLELLRNILKEYGTNKSKVVTVSIDYHSINFMTWFEDGSIKTCYPQLQSAWTCGYNMPELYKVQNCVMEPCNIPNYGVGITLPSGILMNVAKYTQLCQYLSKTTICVPHNMRVMHFGAGSDKGVAPGSTVLKQWLPEGTLLVDNDIVDYVSDAHVSVLSDCNKYNTEHKFDLVISDMYTDNDSKRKHEGVIANNGNDDVFIYLSSFLRNNLALGGSFAVKVTETSWHEVLYDIAQDCAWWTMFCTAVNASSSEAFLIGVNYLGASEKVKVSGKTLHANYIFWRNCNYLQTSAYSIFDVAKFDLRLKATPVVNLKTEQKTDLVFNLIKCGKLLVRDVGNTSFTSDSFVCTM

SEQ ID NO: 86 - protein, 2685 aa, bovine coronavirus
  MISC_FEATURE: ORF 1B
FFKRVRGTSVDARLVPCASGLSTDVQLRAFDICNASVAGIGLHLKVNCCRFQRVDENGDKLDQFFVVKRTDLTIYNREMECYERVKDCKFVAEHDFFTFDVEGSRVPHIVRKDLTKYTMLDLCYALRHFDRNDCMLLCDILSIYAGCEQSYFTKKDWYDFVENPDIINVYKKLGPIFNRALVSATEFADKLVEVGLVGILTLDNQDLNGKWYDFGDYVIAAPGCGVAIADSYYSYMMPMLTMCHALDCELYVNNAYRLFDLVQYDFTDYKLELFNKYFKHWSMPYHPNTVDCQDDRCIIHCANFNILFSMVLPNTCFGPLVRQIFVDGVPFVVSIGYHYKELGIVMNMDVDTHRYRLSLKDLLLYAADPALHVASASALYDLRTCCFSVAAITSGVKFQTVKPGNFNQDFYDFILSKGLLKEGSSVDLKHFFFTQDGNAAITDYNYYKYNLPTMVDIKQLLFVLEVVYKYFEIYDGGCIPAAQVIVNNYDKSAGYPFNKFGKARLYYEALSFEEQDEIYAYTKRNVLPTLTQMNLKYAISAKNRARTVAGVSILSTMTGRMFHQKCLKSIAATRGVPVVIGTTKFYGGWDDMLRRLIKDVDNPVLMGWDYPKCDRAMPNILRIVSSLVLARKHEACCSQSDRFYRLANECAQVLSEIVMCGGCYYVKPGGTSSGDATTAFANSVFNICQAVSANVCALMSCNGNKIEDLSIRALQKRLYSHVYRSDMVDSTFVTEYYEFLNKHFSMMILSDDGVVCYNSDYASKGYIANISAFQQVLYYQNNVFMSESKCWVENDINNGPHEFCSQHTMLVKMDGDDVYLPYPVPSRILGAGCFVDDLLKTDSVLLIERFVSLAIDAYPLVYHENEEYQKVFRVYLEYIKKLYNELGNQILDSYSVILSTCDGQKFTDESFYKNMYLRSAVMQSVGACVVCSSQTSLRCGSCIRKPLLCCKCCYDHVMATDHKYVLSVSPYVCNAPGCDVNDVTKLYLGGMSYYCEDHKPQYSFKLVMNGMVFGLYKQSCTGSPYIDDFNRIASCKWTDVDDYILANECTERLKLFAAETQKATEEAFKQSYASATIQEIVSERELILSWEIGKVKPPLNKNYVFTGYHFTKNGKTVLGEYVFDKSELTNGVYYRATTTYKLSVGDVFVLTSHSVANLSAPTLVPQENYSSIRFASVYSVLETFQNNVVNYQHIGMKRYCTVQGPPGTGKSHLAIGLAVYYCTARVVYTAASHAAVDALCEKAYKFLNINDCTRIVPAKVRVECYDKFKINDTTRKYVFTTINALPEMVTDIVVVDEVSMLTNYELSVINARIRAKHYVYIGDPAQLPAPRVLLSKGTLEPKYFNTVTKLMCCLGPDIFLGTCYRCPKEIVDTVSALVYENKLKAKNESSSLCFKVYYKGVTTHESSSAVNMQQIYLINKFLKANPLWHKAVFISPYNSQNFAAKRVLGLQTQTVDSAQGSEYDYVIYSQTAETAHSVNVNRFNVAITRAKKGILCVMSNMQLFEALQFTTLTVDKVPQAVETRVQCSTNLFKDCSKSYSGYHPAHAPSFLAVDDKYKATGDLAVCLGIGDSAVTYSRLISLMGFKLDVTLDGYCKLFITKEEAVKRVRAWVGFDAEGAHATRDSIGTNFPLQLGFSTGIDFVVEATGLFADRDGYSFKKAVAKAPPGEQFKHLIPLMTRGQRWDVVRPRIVQMFADHLIDLSDCVVLVTWAANFELTCLRYFAKVGREISCNVSTKRATAYNSRTGYYGCWRHSVTCDYLYNPLIVDIQQWGYIGSLSSNHDLYCSVHKGAHVASSDAIMTRCLAVYDCFCNNINWNVEYPIISNELSINTSCRVLQRVMLKAAMLCNRYTLCYDIGNPKAIACVKDFDFKFYDAQPIVKSVKTLLYFFEAHKDSFKDGLCMFWNCNVDKYPPNAVVCRFDTRVLNNLNLPGCNGGSLYVNKHAFHTKPFSRAAFEHLKPMPFFYYSDTPCVYMDGMDAKQVDYVPLKSATCITRCNLGGAVCLKHAEEYREYLESYNTATTAGFTFWVYKTFDFYNLWNTFTKLQSLENVVYNLVKTGHYTGQAGEMPCAIINDKVVAKIDKEDVVIFINNTTYPTNVAVELFAKRSIRHHPELKLFRNLNIDVCWKHVIWDYARESIFCSNTYGVCMYTDLKLIDKLNVLFDGRDNGALEAFKRSNNGVYISTTKVKSLSMIRGPPRAELNGVVVDKVGDTDCVFYFAVRKEGQDVIFSQFDSLRVSSNQSPQGNLGSNEPGNVGGNDALATSTIFTQSRVISSFTCRTDMEKDFIALDQDVFIQKYGLEDYAFEHIVYGNFNQKIIGGLHLLIGLYRRQQTSNLVIQEFVSYDSSIHSYFITDEKSGGSKSVCTVIDILLDDFVALVKSLNLNCVSKVVNVNVDFKDFQFMLWCNDEKVMTFYPRLQAASDWKPGYSMPVLYKYLNSPMERVSLWNYGKPVTLPTGCMMNVAKYTQLCQYLNTTTLAVPVNTRVLHLGAGSEKGVAPGSAVLRQWLPAGTILRQWLPAGTILVHNDLYPFVSDSVATYFGDCITLPFDCQWDLIISDMYDLLLDIGVHVVRCSYIHCHMIRDKLALGGSVAIKITEFSWNAELYKLMGYFAFWTVFCTNANASSSEGFLIGINYLGKPKVEIDGNVMHAIICFGEIPQFGTGVLIACLIWLNSRLSWLVMP

SEQ ID NO: 87 - protein, 2678 aa, EMCR Coronavirus; identical to SEQ ID NO: 8
  MISC_FEATURE: ORF 1B
  MISC_FEATURE (844)..(844): Unknown amino acid

SEQ ID NO: 88 - protein, 2733 aa, murine hepatitis virus
  MISC_FEATURE: ORF 1B
LFLCRHRLPVSVKRHELFKRVRGTSVNARLVPCASGLDTDVQLRAFDICNANRAGIGLYYKVNCCRFQRADEDGNTLDKFFVIKRTNLEVYNKEKECYELTKECGVVAEHEFFTFDVEGSRVPHIVRKDLSKYTMLDLCYALRHFDRNDCSTLKEILLTYAECDESYFQKKDWYDFVENSDIINVYKKLGPIFNRALLNTAKFADTLVEAGLVGVLTLDNQDLYGQWYDFGDFVKTVPGCGVAVADSYYSYMMPMLTMCHALDSELFINGTYREFDLVQYDFTDFKLELFNKYFKYWSMTYHPNTCECEDDRCIIHCANFNILFSMVLPKTCFGPLVRQIFVDGVPFVVSIGYHYKELGVVMNMDVDTHRYRLSLKDLLLYAADPALHVASASALLDLRTCCFSVAAITSGVKFQTVKPGNFNQDFYEFILSKGLLKEGSSVDLKHFFFTQDGNAAITDYNYYKYNLPTMVDIKQLLFVLEVVNKYFEIYDGGCIPATQVIVNNYDKSAGYPFNKFGKARLYYEALSFEEQDEVYAYTKRNVLPTLTQMNLKYAISAKNRARTVAGVSILSTMTGRMFHQKCLKSIAATRGVPVVIGTTKFYGGWDDMLRRLIKDVDSPVLMGWDYPKCDRAMPNILRIISSLVLARKHDSCCSHTDRFYRLANECAQVLSEIVMCGGCYYVKPGGTSSGDATTAFANSVFNICQAVSANVCSLMACNGHKIEDLSIRELQKRLYSNVYRADHVDPAFVNEYYEFLNKHFSMMILSDDGVVCYNSEFASKGYIANISAFQQVLYYQNNVFMSEAKCWVETDIEKGPHEFCSQHTMLVKMDGDEVYLPYPDPSRILGAGCFVDDLLKTDSVLLIERFVSLAIDAYPLVYHENPEYQNVFRVYLEYIKKLYNDLGNQILDSYSVILSTCDGQKFTDETFYKNMYLRSAVMQSVGACVVCSSQTSLRCGSCIRKPLLCCKCAYDHVMSTDHKYVLSVSPYVCNSPGCDVNDVTKLYLGGMSYYCEDHKPQYSFKLVMNGMVFGLYKQSCTGSPYIEDFNKIASCKWTEVDDYVLANECTERLKLFAAETQKATEESFKQCYASATIREIVSDRELILSWEIGKVRPPLNKNYVFTGYHFTSNGKTVLGEYVFDKSELTNGVYYRATTTYKLSVGDVFILTSHAVSSLSAPTLVPQENYTSIRFASVYSVPETFQNNVPNYQHIGMKRYCTVQGPPGTGKSHLAIGLAVYYCTARVVYTAASHAAVDALCEKAYKFLNINDCTRIVPAKVRVDCYDKFKVNDTTRKYVFTTINALPELVTDIIVVDEVSMLTNYELSVINSRVRAKHYVYIGDPAQLPAPRVLLNKGTLEPRYFNSVTKLMCCLGPDIFLGTCYRCPKEIVDTVSALVYHNKLKAKNDNSSMCFKVYYKGQTTHESSSAVNMQQIYLISKFLKANPSWSNAVFISPYNSQNYVAKRVLGLQTQTVDSAQGSEYDFVIYSQTAETAHSVNVNRFNVAITRAKKGILCVMSSMQLFESLNFSTLTLDKINNPRLQCTTNLFKDCSRSYAGYHPAHAPSFLAVDDKYKVGGDLAVCLNVADSAVTYSRLISLMGFKLDLTLDGYCKLFITRDEAIRRVRAWVGFDAEGAHATRDSIGTNFPLQLGFSTGIDFVVEATGMFAERDGYVFKKAVARAPPGEQFKHLVPLMSRGQKWDVVRIRIVQMLSDHLVDLADSVVLVTWAASFELTCLRYFAKVGKEVVCSVCNKRATCFNSRTGYYGCWRHSYSCDYLYNPLIVDIQQWGYTGSLTSNHDLICSVHKGAHVASSDAIMTRCLAVHDCFCKSVNWSLEYPIISNEVSVNTSCRLLQRVMFRAAMLCNRYDVCYDIGNPKGLACVKGYDFKFYDASPVVKSVKQFVYKYEAHKDQFLDGLCMFWNCNVDKYPANAVVCRFDTRVLNKLNLPGCNGGSLYVNKHAFHTSPFTRAAFENLKPMPFFYYSDTPCVYMEGMESKQVDYVPLRSATCITRCNLGGAVCLKHAEDYREYLESYNTATTAGFTFWVYKTFDFYNLWNTFTRLQSLENVVYNLVNAGHFDGRAGELPCAVIGEKVIAKIQNEDVVVFKNNTPFPTNVAVELFAKRSIRPHPELKLFRNLNIDVCWSHVLWDYAKDSVFCSSTYKVCKYTDLQCIESLNVLFDGRDNGALEAFKKCRDGVYINTTKIKSLSMIKGPQRADLNGVVVEKVGDSDVEFWFAMRRDGDDVIFSRTGSLEPSHYRSPQGNPGGNRVGDLSGNEALARGTIFTQSRFLSSFAPRSEMEKDFMDLDEDVFIAKYSLQDYAFEHVVYGSFNQKIIGGLHLLIGLARRQQKSNLVIQEFVPYDSSIHSYFITDENSGSSKSVCTVIDLLLDDFVDIVKSLNLNCVSKVVNVNVDFKDFQFMLWCNEEKVMTFYPRLQAAADWKPGYVMPVLYKYLESPLERVNLWNYGKPITLPTGCLMNVAKYTQLCQYLNTTTLAVPANMRVLHLGAGSDKDVAPGSAVLRQWLPAGSILVDNDINPFVSDSVASYYGNCITLPIACQWDLIISDMYDPLTKNIGEYNVSKDGFFTYLCHLIRDKLALGGSVAIKITEFSWNAELYSLMGKFAFWTIFCTNVNASSSEGFLIGINWLNRTRTEIDGKTMHANYLFWRNSTMWNGGAYSLFDMSKFPLKVAGTAVVSLKPDQINDLVLSLIEKGKLLVRDTRKEVFVGDSLVNVK

SEQ ID NO: 89 - protein, 2721 aa, human coronavirus OC43
  MISC_FEATURE: ORF 1B
FFKRVRGTSVDARLVPCASGLSTDVQLRAFDIYNASVAGIGLHLKVNCCRFQRVDENGDKLDQFFVVKRTDLTIYNREMKCYERVKDCKFVAEHDFFTFDVEGSRVPHIVRKDLTKYTMLDLCYALRHFDRNDCMLLCDILSIYAGCEQSYFTKKDWYDFVENPDIINVYKKLGPIFNRALVSATEFADKLVEVGLVGVLTLDNQDLNGKWYDFGDYVIAAPGCGVAIADSYYSYIMPMLTMCHALDCELYVNNAYRLFDLVQYDFTDYKLELFNKYFKHWSMPYHPNTVDCQDDRCIIHCANFNILFSMVLPNTCFGPLVRQIFVDGVPFVVSIGYHYKELGIVMNMDVDTHRYRLSLKDLLLYAADPALHVASASALYDLRTCCFSVAAITSGVKFQTVKPGNFNQDFYDFVLSKGLLKEGSSVDLKHFFFTQDGNAAITDYNYYKYNLPTMVDIKQLLFVLEVVYKYFEIYDGGCIPASQVIVNNYDKSAGYPFNKFGKARLYYEALSFEEQDEIYAYTKRNVLPTLTQMNLKYAISAKNRARTVAGVSILSTMTGRMFHQKCLKSIAATRGVPVVIGTTKFYGGWDDMLRRLIKDVDNPVLMGWDYPKCDRAMPNLLRIVSSLVLARKHETCCSQSDRFYRLANECAQVLSEIVMCGGCYYVKPGGTSSGDATTAFANSVFNICQAVSANVCALMSCNGNKIEDLSIRALQKRLYSHVYRSDKVDSTFVTEYYEFLNKHFSMMILSDDGVVCYNSDYASKGYIANISAFQQVLYYQNNVFMSESKCWVEHDINNGPHEFCSQHTMLVKMDGDDVYLPYPNPSRILGAGCFVDDLLKTDSVLLIERFVSLAIDAYPLVYHENEEYQKVFRVYLAYIKKLYNDLGNQILDSYSVILSTCDGQKFTDESFYKNMYLRSAVMQSVGACVVCSSQTSLRCGSCIRKPLLCCKCCYDHVMATDHKYVLSVSPYVCNAPGCDVNDVTKLYLGGMSYYCEDHKPQYSFKLVMNGLVFGLYKQSCTGSPYIDDFNRIASCKWTDVDDYILANECTERLKLFAAETQKATEEAFKQSYASATIQEIVSERELILSWEIGKVKPPLNKNYVFTGYHFTKNGKTVLGEYVFDKSELTNGVYYRATTTYKLSVGDVFVLTSHSVANLSAPTLVPQENYSSIRFASVYSVLETFQNNVVNYQHIGMKRYCTVQGPPGTGKSHLAIGLAVFYCTARVVYTAASHAAVDALCEKAYKFLNINDCTRIVPAKVRVECYDKFKINDTTRKYVFTTINALPEMVTDIVVVDEVSMLTNYELSVINARIRAKHYVYIGDPAQLPAPRVLLSKGTLEPKYFNTVTKLMCCLGPDIFLGTCYRCPKEIVDTVSALVYENKLKAKNESSSLCFKVYYKGVTTHESSSAVNMQQIYLINKFLKANPLWHKAVFISPYNSQNFAAKRVLGLQTQTVDSAQGSEYDYVIYSQTAETAHSVNVNRFNVAITRAKKGILCVMSNMQLFEALQFTTLTLDKVPQAVETKVQCSTNLFKDCSKSYSGYHPAHAPSFLAVDDKYKATGDLAVCLGIGDSAVTYSRLISLMGFKLDVTLDGYCKLFITKEEAVKRVRAWVGFDAEGAHATRDSIGTNFPLQLGFSTGIDFVVEATGLFADRDGYSFKKAVAKAPPGEQFKHLIPLMTRGHRWDVVRPRIVQMFADHLIDLSDCVVLVTWAANFELTCLRYFAKVGREISCNVCTKRATVYNSRTGYYGCWRHSVTCDYLYNPLIVDIQQWGYIGSLSSNHDLYCSVHKGAHVASSDAIMTRCLAVYDCFCNNINWNVEYPIISNELSINTSCRVLQRVILKAAMLCNRYTLCYDIGNPKAIACVKDFDFKFYDAQPIVKSVKTLLYSFEAHKDSFKDGLCMFWNCNVDKYPPNAVVCRFDTRVLNNLNLPGCNGGSLYVNKHAFHTKPFARAAFEHLKPMPFFYYSDTPCVYMDGMDAKQVDYVPLKSATCITRCNLGGAVCLKHAEEYREYLESYNTATTAGFTFWVYKTFDFYNLWNTFTKLQSLENVVYNLVKTGHYTGQAGEMPCAIINDKVVAKIDKEDVVIFINNTTYPTNVAVELFAKRSVRHHPELKLFRNLNIDVCWKHVIWDYARESIFCSNTYGVCMYTDLKFIDKLNVLFDGRDNGALEAFKRSNNGVYISTTKVKSLSMIRGPPRAELNGVVVDKVGDTDCVFYFAVRKEGQDVIFSQFDSLGVSSNQSPQGNLGSNGKPGNVGGNDALSISTIFTQSRVISSFTCRTDMEKDFIALDQDVFIQKYGLEDYAFEHIVYGNFNQKIIGGLHLLIGLYRRQQTSNLVVQEFVSYDSSIHSYFITDEKSGGSKSVCTVIDILLDDFVALVKSLNLNCVSKVVNVNVDFKDFQFMLWCNDEKVMTFYPRLQAASDWKPGYSMPVLYKYLNSPMERVSLWNYGKPVTLPTGCMMNVAKYTQLCQYLNTTTLAVPVNMRVLHLGAGSEKGVAPGSAVLRQWLPAGTILVDNDLYPFVSDSVATYFGDCITLPFDCQWDLIISDMYDPITKNIGEYNVSKDGFFTYICHMIRDKLALGGSVAIKITEFSWNAELYKLMGYFAFWTVFCTNANASSSEGFLIGINYLCKPKVEIDGNVMHANYLFWRNSTVWNGGAYSLFDMAKFPLKLAGTAVINLRADQINDMVYSLLEKGKLLIRDTNKEVFVGDSLVNVI

SEQ ID NO: 90 - protein, 2678 aa, porcine epidemic diarrhea virus
  MISC_FEATURE: ORF 1B
YGLFKRVRGSSAARLEPCNGTDTQHVYRAFDIYNKDVACLGKFLKVNCVRLKNLDKHDAFYVVKRCTKSAMEHEQSIYSRLEKCGAIAEHDFFTWKDGRAIYGNVCRKDLTEYTMMDLCYALRNFDENNCDVLKSILIKVGACEESYFNNKVWFDPVENEDIHRVYALLGTIVARAMLKCVKFCDAMVEQGIVGVVTLDNQDLNGDFYDFGDFTCSIKGMGVPICTSYYSYMMPVMGMTNCLASECFVKSDIFGEDFKSYDLLEYDFTEHKTALFNKYFKYWGLQYHPNCVDCSDEQCIVHCANFNTLFSTTIPITAFGPLCRKCWIDGVPLVTTAGYHFKQLGIVWNNDLNLHSSRLSINELLQFCSDPALLIASSPALVDQRTVCFSVAALGTGMTNQTVKPGHFNKEFYDFLLEQGFFSEGSELTLKHFFFAQKVDAAVKDFDYYRYNRPTVLDICQARVVYQIVQRYFDIYEGGCITAKEVVVTNLNKSAGYPLNKFGKAGLYYESLSYEEQDELYAYTKRNILPTMTQLNLKYAISGKERARTVGGVSLLSTMTTRQYHQKHLKSIVNTRGASVVIGTTKFYGGWDNMLKNLIDGVENPCLMGWDYPKCDRALPNMIRMISAMILGSKHTTCCSSTDRFFRLCNELAQVLTEVVYSNGGFYLKPGGTTSGDATTAYANSVFNIFQAVSANVNKLLSVDSNVCHNLEVKQLQRKLYECCYRSTIVDDQFVVEYYGYLRKHFSMMILSDDGVVCYNNDYASLGYVADLNAFKAVLYYQNNVFMSASKCWIEPDINKGPHEFCSQHTMQIVDKEGTYYLPYPDPSRILSAGVFVDDVVKTDAVVLLERYVSLAIDAYPLSKHENPEYKKVFYVLLDWVKHLYKTLNAGVLESFSVTLLEDSTAKFWDESFYANMYEKSAVLQSAGLCVVCGSQTVLRCGDCLRRPMLCTKCAYDHVIGTTHKFILAITPYVCCASDCGVNDVTKLYLGGLSYWCHEHKPRLAFPLCSAGNVFGLYKNSATGSPDVEDFNRIATSDWTDVSDYRLANDVKDSLRLFAAETIKAKEESVKSSYACATLHEVVGPKELLLKWEVGRPKPPLNRNSVFTCYHITKNTKFQIGEFVFEKAEYDNDAVTYKTTATTKLVPGMVFVLTSHNVQPLRAPTIANQERYSTIHKLHPAFNIPEAYSSLVPYYQLIGKQKITTIQGPPGSGKSHCVIGLGLYYPGARIVFTACSHAAVDSLCVKASTAYSNDKCSRIIPQRARVECYDGFKSNNTSAQYLFSTVNALPECNADIVVVDEVSMCTNYDLSVINQRISYRHVVYVGDPQQLPAPRVMISRGTLEPKDYNVVTQRMCALKPDVFLHKCYRCPAEIVRTVSEMVYENQFIPVHPDSKQCFKIFCKGNVQVDNGSSINRRQLDVVRMFLAKNPRWSKAVFISPYNSQNYVASRLLGLQIQTVDSSQGSEYDYVIYAQTSDTAHASNVNRFNVAITRAKKGILCIMCDRSLFDLLKFFELKLSDLQANEGCGLFKDCSRGDDLLPPSHANTFMSLADNFKTDQYLAVQIGVNGPIKYEHVISFMGFRFDINIPNHHTLFCTRDFAMRNVRGWLGFDVEGAHVVGSNVGTNVPLQLGFSNGVDFVVRPEGCVVTESGDYIKPVRARAPPGEQFAHLLPLLKRGQPWDVVRKRIVQMCSDYLANLSDILIFVLWAGGLELTTMRYFVKIGPSKSCDCGKVATCYNSALHTYCCFKHALGCDYLYNPYCIDIQQWGYKGSLSLNHHEHCNVHRNEHVASGDAIMTRCLAIHDCFVKNVDWSITYPFIGNEAVINKSGRIVQSHTMRSVLKLYNPKAIYDIGNPKGIRCAVTDAKWFCFDKNPTNSNVKTLEYDYITHGQFDGLCLFWNCNVDMYPEFSVVCRFDTRCRSPLNLEGCNGGSLYVNNHAFHTPAFDKRAFAKLKPMPFFFYDDTECDKLQDSINYVPLRASNCITKCNVGGAVCSKHCAMYHSYVNAYNTFTSAGFTIWVPTSFDTYNLWQTFSNNLQGLENIAFNVLKKGSFVGDEGELPVAVVNDKVLVRDGTVDTLVFTNKTSLPTNVAFELYAKRKVGLTPPITILRNLGVVCTSKCVIWDYEAERPLTTFTKDVCKYTDFEGDVCTLFDNSIVGSLERFSMTQNAVLMSLTAVKKLTGIKLTYGYLNGVPVNTHEDKPFTWYIYTRKNGKFEDYPDGYFTQGRTTADFSPRSDMEKDFLSMDMGLFINKYGLEDYGFEHVVYGDVSKTTLGGLHLLISQVRLACMGVLKIDEFVSSNDSTLKSCTVTYADNPSSKMVCTYMDLLLDDFVSILKSLDLSVVSKVHEVMVDCKMWRWMLWCKDHKLQTFYPQLQASEWKCGYSMPSIYKIQRMCLEPCNLYNYGAGVKLPDGIMFNVVKYTQLCQYLNSTTMCVPHHMRVLHLGAGSDKGVAPGTAVLRRWLPLDAIIVDNDSVDYVSDADYSVTGDCSTLYLSDKFDLVISDMYDGKIKSCDGENVSKEGFFPYINGVITEKLALGGTVAIKVTEFSWNKKLYELIQKFEYWTMFCTSVNTSSSEAFLIGVHYLGDFASGAVIDGNTMHANYIFWRNSTIMTMSYNSVLDLSKFNCKHKATVVVNLKDSSISDVVLGLLKNGKLLVRNNDAICGFSNHLVNVNK

SEQ ID NO: 91 - protein, 2672 aa, human coronavirus 229E
  MISC_FEATURE: ORF 1B
EPCNGTDIDYCVRAFDVYNKDASFIGKNLKSNCVRFKNVDKDDAFYIVKRCIKSVMDHEQSMYNLLKGCNAVAKHDFFTWHEGRTIYGNVSRQDLTKYTMMDLCFALRNFDEKDCEVFKEILVLTGCCSTDYFEMKNWFDPIENEDIHRVYAALGKVVANAMLKCVAFCDEMVLKGVVGVLTLDNQDLNGNFYDFGDFVLCPPGMGIPYCTSYYSYMMPVMGMTNCLASECFMKSDIFGQDFKTFDLLKYDFTEHKEVLFNKYFKYWGQDYHPDCVDCHDEMCILHCSNFNTLFATTIPNTAFGPLCRKVFIDGVPVVATAGYHFKQLGLVWNKDVNTHSTRLTITELLQFVTDPTLIVASSPALVDKRTVCFSVAALSTGLTSQTVKPGHFNKEFYDFLRSQGFFDEGSELTLKHFFFTQKGDAAIKDFDYYRYNRPTMLDIGQARVAYQVAARYFDCYEGGCITSREVVVTNLNKSAGWPLNKFGKAGLYYESISYEEQDAIFSLTKRNILPTMTQLNLKYAISGKERARTVGGVSLLATMTTRQFHQKCLKSIVATRNATVVIGTTKFYGGWDNMLKNLMADVDDPKLMGWDYPKCDRAMPSMIRMLSAMILGSKHVTCCTASDKFYRLSNELAQVLTEVVYSNGGFYFKPGGTTSGDATTAYANSVFNIFQAVSSNINCVLSVNSSNCNNFNVKKLQRQLYDNCYRNSNVDESFVDDFYGYLQKHFSMMILSDDSVVCYNKTYAGLGYIADISAFKATLYYQNGVFMSTAKCWTEEDLSIGPHEFCSQHTMQIVDENGKYYLPYPDPSRIISAGVFVDDITKTDAVILLERYVSLAIDAYPLSKHPKPEYRKVFYALLDWVKHLNKTLNEGVLESFSVTLLDEHESKFWDESFYASMYEKSTVLQAAGLCVVCGSQTVLRCGDCLRRPMLCTKCAYDHVFGTDHKFILAITPYVCNTSGCNVNDVTKLYLGGLNYYCVDHKPHLSFPLCSAGNVFGLYKSSALGSMDIDVFNKLSTSDWSDIRDYKLANDAKESLRLFAAETVKAKEESVKSSYAYATLKEIVGPKELLLLWESGKAKPPLNRNSVFTCFQITKDSKFQVGEFVFEKVDYGSDTVTYKSTATTKLVPGMLFILTSHNVAPLRAPTMANQEKYSTIYKLHPSFNVSDAYANLVPYYQLIGKQRITTIQGPPGSGKSHCSIGIGVYYPGARIVFTACSHAAVDSLCAKAVTAYSVDKCTRIIPARARVECYSGFKPNNNSAQYVFSTVNALPEVNADIVVVDEVSMCTNYDLSVINQRISYKHIVYVGDPQQLPAPRVLISKGVMEPIDYNVVTQRMCAIGPDVFLHKCYRCPAEIVNTVSELVYENKFVPVKEASKQCFKIFERGSVQVDNGSSINRRQLDVVKRFIHKNSTWSKAVFISPYNSQNYVAARLLGLQTQTVDSAQGSEYDYVIFAQTSDTAHACNANRFNVAITRAKKGIFCIMSDRTLFDALKFFEITMTDLQSESSCGLFKDCARNPIDLPPSHATTYLSLSDRFKTSGDLAVQIGNNNVCTYEHVISYMGFRFDVSMPGSHSLFCTRDFAMRHVRGWLGMDVEGAHVTGDNVGTNVPLQVGFSNGVDFVAQPEGCVLTNTGSVVKPVRARAPPGEQFTHIVPLLRKGQPWSVLRKRIVQMIADFLAGSSDVLVFVLWAGGLELTTMRYFVKIGAVKHCQCGTVATCYNSVSNDYCCFKHALGCDYVYNPYVIDIQQWGYVGSLSTNHHAICNVHRNEHVASGDAIMTRCLAVYDCFVKNVDWSITYPMIANENAINKGGRTVQSHIMRAAIKLYNPKAIHDIGNPKGIRCAVTDAKWYCYDKNPINSNVKTLEYDYMTHGQMDGLCLFWNCNVDMYPEFSIVCRFDTRTRSTLNLEGVNGGSLYVNNHAFHTPAYDKRAMAKLKPAPFFYYDDGSCEVVHDQVNYVPLRATNCITKCNIGGAVCSKHANLYRAYVESYNIFTQAGFNIWVPTTFDCYNLWQTFTEVNLQGLENIAFNVVNKGSFVGADGELPVAISGDKVFVRDGNTDNLVFVNKTSLPTNIAFELFAKRKVGLTPPLSILKNLGVVATYKFVLWDYEAERPLTSFTKSVCGYTDFAEDVCTCYDNSIQGSYERFTLSTNAVLFSATAVKTGGKSLPAIKLNFGMLNGNAIATVKSEDGNIKNINWFVYVRKDGKPVDHYDGFYTQGRNLQDFLPRSTMEEDFLNMDIGVFIQKYGLEDFNFEHVVYGDVSKTTLGGLHLLISQVRLSKMGILKAEEFVAASDITLKCCTVTYLNDPSSKTVCTYMDLLLDDFVSVLKSLDLTVVSKVHEVIIDNKPWRWMLWCKDNAVATFYPQLQSAEWKCGYSMPGIYKTQRMCLEPCNLYNYGAGLKLPSGIMFNVVKYTQLCQYFNSTTLCVPHNMRVLHLGAGSDYGVAPGTAVLKRWLPHDAIVVDNDVVDYVSDADFSVTGDCATVYLEDKFDLLISDMYDGRTKAIDGENVSKEGFFTYINGFICEKLAIGGSIAIKVTEYSWNKKLYELVQRFSFWTMFCTSVNTSSSEAFVVGINYLGDFAQGPFIDGNIIHANYVFWRNSTVMSLSYNSVLDLSKFNCKHKATVVVQLKDSDINEMVLSLVRSGKLLVRGNGKCLSFSNHLVSTK

SEQ ID NO: 92 - protein, 448 aa, human coronavirus OC43
  MISC_FEATURE: ORF N
MSFTPGKQSSSRASSGNRSGNGILKWADQSDQFRNVQTRGRRAQPKQTATSQQPSGGNVVPYYSWFSGITQFQKGKEFEFVEGQGVPIAPGVPATEAKGYWYRHNRRSFKTADGNQRQLLPRWYFYYLGTGPHAKDQYGTDIDGVYWVASNQADVNTPADIVDRDPSSDEAIPTRFPPGTVLPQGYYIEGSGRSAPNSRSTSRTSSRASSAGSRSRANSGNRTPTSGVTPDMADQIASLVLAKLGKDATKPQQVTKHTAKEVRQKILNKPRQKRSPNKQCTVQQCFGKRGPNQNFGGGEMLKLGTSDPQFPILAELAPTAGAFFFGSRLELAKVQNLSGNPDEPQKDVYELRYNGAIRFDSTLSGFETIMKVLNENLNAYQQQDGMMNMSPKPQRQRGHKNGQGENDNISVAVPKSRVQQNKSRELTAEDISLLKKMDEPYTEDTSEI

SEQ ID NO: 93 - protein, 451 aa, murine hepatitis virus
  MISC_FEATURE: ORF N
MSFVPGQENAGSRSSSGNRAGNGILKKTTWADQTERGNRGRRNHPKQTATTQPNAGSVVPHYSWFSGITQFQKGKEFQFAQGQGVPIASGIPASEQKGYWYRHNRRSFKTPDGQHKQLLPRWYFYYLGTGPHAGAEYGDDIEGVVWVASQQADTKTTADVVERDPSSHEAIPTRFAPGTVLPQGFYVEGSGRSAPASRSGSRSQSRGPNNRARSSSNQRQPASAVKPDMAEEIAALVLAKLGKDAGQPKQVTKQSAKEVRQKILTKPRQKRTPNKQCPVQQCFGKRGPNQNFGGSEMLKLGTSDPQFPILAELAPTPSAFFFGSKLELVKKNSGGADEPTKDVYELQYSGAIRFDSTLPGFETIMKVLTENLNAYQDQAGSVDLVSPKPPRRGRRQAQEKKDEVDNVSVAKPKSLVQRNVSRELTPEDRSLLAQILDDGVVPDGLEDDSNV

SEQ ID NO: 94 - protein, 409 aa, avian infectious bronchitis virus
  MISC_FEATURE: ORF N
MASGKAAGKTDAPAPVIKLGGPKPPKVGSSGNASWFQAIKAKKLNTPPPKFEGSGVPDNENIKPSQQHGYWRRQARFKPGKGGRKPVPDAWYFYYTGTGPAADLNWGDTQDGIVWVAAKGADTKSRSNQGTRDPDKFDQYPLRFSDGGPDGNFRWDFIPLNRGRSGRSTAASSAAASRAPSREGSRGRRSDSGDDLIARAAKIIQDQQKKGSRITKAKADEMAHRRYCKRTIPPNYRVDQVFGPRTKGKEGNFGDDKMNEEGIKDGRVTAMLNLVPSSHACLFGSRVTPKLQLDGLHLRFEFTTVVPCDDPQFDNYVKICDQCVDGVGTRPKDDEPKPKSRSSSRPATRGNSPAPRQQRPKKEKKLKKQDDEADKALTSDEERNNAQLEFYDEPKVINWGDAALGENEL

SEQ ID NO: 95 - protein, 448 aa, bovine corona virus
  MISC_FEATURE: ORF N
MSFTPGKQSSSRASFGNRSGNGILKWADQSDQSRNVQTRGRRAQPKQTATSQLPSGGNVVPYYSWFSGITQFQKGKEFEFAEGQGVPIAPGVPATEAKGYWYRHNRRSFKTADGNQRQLLPRWYFYYLGTGPHAKDQYGTDIDGVFWVASNQADVNTPADILDRDPSSDEAIPTRFPPGTVLPQGYYIEGSGRSAPNSRSTSRASSRASSAGSRSRANSGNRTPTSGVTPDMADQIASLVLAKLGKDATKPQQVTKQTAKEIRQKILNKPRQKRSPNKQCTVQQCFGKRGPNQNFGGGEMLKLGTSDPQFPILAELAPTAGAFFFGSRLELAKVQNLSGNLDEPQKDVYELRYNGAIRFDSTLSGFETIMKVLNENLNAYQQQDGMMNMSPKPQRQRGQKNGQGENDNISVAAPKSRVQQNKSRELTAEDISLLKKMDEPYTEDTSEI

SEQ ID NO: 96 - protein, 449 aa, porcine haemagglutinating encaphalomyelitis virus
  MISC_FEATURE: ORF N
MSFTPGKQSSSRASSGNRSGNGILKWADQSDQSRNVQTRGRRVQSKQTATSQQPSGGTVVPYYSWFSGITQFQKGKEFEFAEGQGVPIAPGVPSTEAKGYWYRHNRRSFKTADGNQRQLLPRWYFYYLGTGPHAKDQYGTDIDGVFWVASNQADINTPADIVDRDPSSDEAIPTRFPPGTVLPQGYYIEGSGRSAPNSRSTSRAPNRAPSAGSRSRANSGNRTSTPGVTPDMADQIASLVLAKLGKDATKPQQVTKQTAKEVRQKILNKPRQKRSPNKQCTVQQCFGKRGPNQNFGGGEMLKLGTSDPQFPILAELAPTAGAFFFGSRLELAKVQNLSGNPDEPQKDVYELRYNGAIRFDSTLSGFETIMKVLNQNLNAYQHQEDGMMNISPKPQRQRGQKNGQVENDNVSVAAPKSRVQQNKSRELTAEDISLLKKMDEPYTEDTSEI

SEQ ID NO: 97 - protein, 422 aa, human SARS virus
  MISC_FEATURE: ORF N
MSDNGPQSNQRSAPRITFGGPTDSTDNNQNGGRNGARPKQRRPQGLPNNTASWFTALTQHGKEELRFPRGQGVPINTNSGPDDQIGYYRRATRRVRGGDGKMKELSPRWYFYYLGTGPEASLPYGANKEGIVWVATEGALNTPKDHIGTRNPNNNAATVLQLPQGTTLPKGFYAEGSRGGSQASSRSSSRSRGNSRNSTPGSSRGNSPARMASGGGETALALLLLDRLNQLESKVSGKGQQQQGQTVTKKSAAEASKKPRQKRTATKQYNVTQAFGRRGPEQTQGNFGDQDLIRQGTDYKHWPQIAQFAPSASAFFGMSRIGMEVTPSGTWLTYHGAIKLDDKDPQFKDNVILLNKHIDAYKTFPPTEPKKDKKKKTDEAQPLPQRQKKQPTVTLLPAADMDDFSRQLQNSMSGASADSTQA
